United States Patent Application Publication US 2007/0054278 A1 - sequence listing, part 25

SEQ ID NO: 93934 - DNA, 26234 bp, Homo sapiens
tgtgaagaatgatattggtagtataataggaatagtattgaatctataaattgctctaggcagtatggcaattttaataatgttgattcttcctatccttgaacaaggaatgtttttccatgtttgtgccatctctgatttctttcagcagtgctttgtaattcttgttgtagagatctttcacctccttggttagctgtattcttaggtattttattctttttgtgtaaaataggtgttttaaattgtataatctgccatttctcgatctgtttttgactgattcttcttccagctatgggttatgttttcctgtttttactcctttctagtaaaacaggattgtagatattaccatgttgagtgcctagatttcattgcttcccttaaaagtgttaacacttgtgttagcaggcagtgagttacttgtagatcagcttgatcacttgttggcttgttgttgtgttctgtttgtgtgtctagagtagcctttagaactattttatccatcaaggtgtgtcccttctgggctctctcctgggtgccctggttgtttaataagctgtctccattgtggctgtttcgaatggctgtccccagcctgatgcaagcactgtgaatagttcacctcaaagcttcatggcagttgttcttgcctgctttgcaaatttcaccctacacagctagcacttaatattcagcagaaggctcagggggatccctctgcagatttctggagctctttctctcagccgtccctcattgctagtaacatgctctgcaaattccagttacctcagcctcttcagactcaatttctgcctcttcttttaagcaggagcctgggctctgggtgccccctccttgtcctgcagtttaggaagtgctccaggcagaaaacggtcactaatggagttcacctcctgttccccttatcttgtggatctcagacatgtccaccatgtgcaaaaagtgctctacacacagctgtccagtttcctagctgtttaccatgtgtgagtagcaggagccatttcgctgccctggccagtagctctcagtgcattttccatttgttcttttatgatgagcaatgctgaccacatttcactgtctctatcaaaggtttctcatgcaccttgttatttacagggggtttctctctgtttcttattaatttatacattaaaaattaatatttttttggaatatgagttaaaaacattgactctctgttacttgtcttttgaatttgcttttttttctgttttttcttaatgaaatcaaatctgtcttctatcttacaagggtcttttaataaaacacagtaattttgaagttcaaatgggaaaataaacaagcaagaagagctaggaaaaaatatgtaataggagaacaatgacagcccagccttgacagaacctgtgacacattacaaagcctcaataattaatacataatagcagatgcaaatataggagaaaaatcaattcacaaagaagaaaattcagaaattaacccaaatatatttacaaatttagtatataataaaaatgacacctcaattctatgttgaaatgatgtattgcaaactagataatgttcatttggggagaaaaacaaaaattcattcacagctttgtgttacagaaagataaactccaaattcattgaagatttagagtgtcaaatatcaaattataaaagaaccaggaattatagaattttttttcaatttcatagtggaaaagacccaagtatggcaacaaaatttctatatttctatatttttacatgatcagcaattatttgtacaacgtacaaatacattgtaaaatacaggaaaaagtacagatatgaaaatatgaaggataaaaagcatctataacattaatactcaccaatactactgtctgcattttgatgtatgcttcaattgattcctattgcgaaacatgtagactgattccacttttagcttttatagccattactatcaggtggtaattatcttgggagagatgctctagatgctcaatatgttttaattacatttatacatatatctagatgctggatacatttgaattagttcactggagtggaaacttgttctttctgctgctgaatatttcatctactttatttcagaggcagcacaacttgtctgcttacattgatgctgcagccatagtatctggagtggattgggtgacccgaggctgctgtatcaggacgacattccttttggtgccacagcagggctttataaccaaagctggtccaataccagcatctgatgggggacttgtataggagctgccagaataactttttccaaggcacttctgtttccacttgctgtgggatttttgtctccacaaggggagagtctgagagcaaagccttcgtaggggaacctggcagaaggtggagagagcacctgggctctgcaaagccagactgaagtcacaagccgctctggacttcttcatcaaatggaccagcaacatctttttctgttaaagcaatttagactagattttctgatacatgcaactgaagcactgtaaataatacatgaatcttatcccctcagaagactttctactttgaactctctcaaccaagcagtattagagcaaataagcaaattcctcagttgagagttaatcttgcaaacatcctgctgtagggaaaggtcatggcctgatctgtaaacacgggaagagagccattggacttgggaatcagatgcagcctcacacggctgcagaccgcaagactcatcctagacacagcttatgtcactgtgatccagctgttgacaaggctggtcacagtgaggacatcttcagtgtgtcagctgaactacagaaaatgttacagattctaatcaacttctgataaaatcatgcgtggtcatagttacatgcagtgaatttctctgtcagaacaaaaagaatatgcaaataaaaatttagacataagcctcaaatcccatcctcagcatcaaatgatggctcacccatttttcctctgctgtaccataaggcatatagagcatgacctgatcagagtgctgatgtcccattctatcatactgatgaagacacaggtcattactaatgaagcctcttaaacctcacatcatggttagcatctgcactctcataaacgtcttaagtcccttgaatcaggcaaaatctctataaatatttaagttttttctaaaaaaagagtggctgccaaacctcaagctaagaaactttcaaataaagttttctttaaaacaaaagttaaaatgttttaaattttcatagtaacacattttttttttaaattagaaggtcttataaaataccggaaagacaatttttactttggaaacctcaaaagcataaatcagcttaagatctggaaataattttaggtattgatcgcagttctataaactcaatgctagagtcactggggacaaacagggacatgagaatcctactcggagtaaattgccacctgaggtgacaaagctgactacggtttccaatctagttgtacacggagggtcaggaatgaaagcaagaagacccaagggcccctctccaccactttccttaccagagttcagattcccaaacttttgcttcccttatattattttcttcaatggactctaattatgaaaggaatacttacaggaaagcaagcttactaaatttggttttccaagttcttactgattacatattaatcaaattattaaaccttatactttatgtgaaatggaggttaactcattaaactgataaaattccatctaagatcaaaggaacttgaatgctgctaaaggtatatttagaataaactaaagaaatcttagccaaaagaaagtgtatgtatctaatctttagagaggctttcaaatgttgctttaagctacttttattaacaaaactgcattttgaactccactgcttgacaactatggcctttgtttcttaagtcaattcttacctttctggggccttggtttaactacttcctttgttttaaggacacaaagcttgtcagttctcaaaataaaaacctgtctctctggtcagatcattaactccctagtcaaactttcagactaccgtctgaacatcaagtgctagcctgagcttgtttccagtcccccaaccccaggctgtggctggggaaggaagaggacagcgaaagctttctctgctccctcgggagacaggaaagccctttatttattcctgcccttcctcttctccaactgaagagtgtgatcttggtacagagcagttccacacatgccacactggtctgatcttttagagtaaaaaatgggatcttctcagagaaaatttttttaaaaacttcatgtgcttaggtctcagagcagagaattttgtcttatcatgacgccactcactggcaaacaagctggcgtgcacagggacttgtgaggctctcagcagagtcagggtagcagttatttccctttgactgcctcaacttcctatgtttgtgttgacatgccagatccttatttctgcggaatgagaaatctcttgagaataaagttttcctaaacagaacaaaagtatcaaatcacttttgatgagcaaacattattttaaacttttttttaacttacaaaagatgaggggtaacatttactagttttacagaaattttctttaaacagaacattagtgaaccaaataaccaattctcctcaaacatgatagacaggatggaggttatcactttgatcattttaacctccaacatagtaatttgtaaacatcagtcgctgcacaagtattttaataacaggccagcccacgggagtaaacagcaccttagcctcgagacctgttctctcaactgtgtgtacagattttctaagtcgttatgaattcagatattccctacatctcaataaaaacacctaggagaacaagaaatcaggacatgcatctcctgtaagcagaagagaaaccgagcacctgctctcttgcgggggggcagcttcgtgtcactttccaactcagcctccacaggagcacgggcatattggttcaaatgaagtgtaaaggacacatctctgtccacagtgtaaatcctatttccttaaggtggtcaaccgattgagaccagttccacacttccttaaagaaggaaaaactcagcagccagcgccaaggcccagcgatcagagaggacccgtgctcgccgcgaccccgcgctcgccctgtggccccgcgaccccggcgccaggtgttggggggaccggcccttcccttccgggtgtgaggggctggcccttctcttccaggttggggggctggcaaactcgaacctcgccggcgccctagccaaggcctcctccccgcgcctgccgcgggttccacgcacattccaagcgcgcgcattcgacccaaacttcagagacgcttctgtggaacggaaggatggtcgctgacacctcgccgttcaaatatcaggaagttaaaaataacacgaccatcgtcatcattccaaacttcggaatagcttttctaaaaatggaaaagacggtggctaaacttcaatcaaaatcgctgtggtcaagaaagtcctggaagctgctctatcttaactttgggcggtttgcggttaacagacgcgcgacctagaaaccccagaggcatcgccggttttcccgtcctcctcctcccaccaccgcccagctcttgagaggggagggtgctgccggacaggtgggtccccgggtactcactgctgcccgcccggccgcggcgccccgtcccgaggctgcccaggaagaggaaggcgcgctgccccgccccgcggacaaggaggccccagcgagggcgtacctgcggcaggtgacgaaggaggcggcgcaaaacacccgccgtgtacgtttcgcgggacaaaaaccacgcgcccgccgggccgcgctcaggccttcgccctcagggacttcggaaccgccccgtcctcaagatcgaaaagcccagagccccgcggcggctccaagcacggtgttgggggtgggggtctcagggagcgcccaggcccaaggccgccctggtccggcgtggaccccgcggggctcaaggcaggttccccgcgtgacccgcccagcccctctatgcgaactcgaacgacaggcaccacagcccgccacgtgcgcgagactcgcgctgtgccccaacccaggtgggcggcccgcggagccgcgaggcctgagcccgccctgcaggtgacccgcggcccttcctcctccaggtacccctctcctgcggccccgtcccctataggtaacctttacctcccgcggctccttcccctccaagcgacccgcagccccgccccctccaggtgactcccccccgccaacccccgccaccacacacacacaccccctcgccttccgcggccctactccctccaggtgaccccacccccgcagctcctcctcctccggacaacctgcagccccgcccctgcaggtgaacggcggcccagtccctgcaggtgacccgcggaccctccccgcccgtcctactaccgtcataggaccgcctccgcaggcgcactggagccgattgcgcaggcgtggctctcacacgcgctgccctgttggcgttggtgcgggactgcgcaggmgcgcggggcaagaggstggcagtgcgcctgcgccgcgtcggcgtgcggaacgccgcggtgtctcggcgyctctgcgcgcgggaagatggcggaacaggctaccaaktccgtgctgtttgtgtgtctgggtaagagggygccgacttactcatgttctgacgtcctctggagagttggatcgggcttgtgcgctgtaggttgtgccgccgssctaggaaccatgagggggaggaggccagggactgggaggcctagggtgttctaggagtgtgccrcagcgcccctgttccccatccgccccgtgcacccgcccagcctgcccgctaaacstgggtcccctcgcgcctgccatatatccgggsctcttggcatctgcagccacagcccctacaagccaaggtactttctttgcgactactagaatccctctcgttcccctccaatgggcccaggtaggcctggaggttgtcggactgatgtggtctcttaggggcctcctgagtcctatgacaacattgttttgtttgctagtttccttagcccatgcttagatagggatctgagttaaagggagatgaagttttacggtttcgggtttcttgattgtaaaagccaagcaaaggagacctggaggtccctatataactttggcccatgaaaaatgaaagtgtattttattaatggcttttcaggaactttccagcttaaattatttcactcctagaatttcaacacttagcttgccttacttcaaacataatttattttccgtttggtcttcagggatcttcctttggtgtagcactacaaggttatattcctcggtgcctccaccctgagaggaaggcctaaattgtcagtagtccggttacttaaaaccttctgtgagtttgcatttcctgcagtttctgtttatttttacagactcctcactttatctcctgtaccttttcctgctcacaccctcgggacactgccttccagaacctttcgttgttcggtagcacttcacatgcttactgagccttcatcgctgggtgcccattatgcattttgcctggaaagcctttttattttataaagtcaaacstaaatatttcctcctttgctttcccagatcatgagttgcttccttatcgacatcttttattacacaaattttactataatttgtgtaatatagtaaaagatgtaatacagaaaaggtgtgattccttatcgacatcttttattacacaaattttactataattatttgatagtctgttgaaatcccagctgagtttaattttgtcgatggcaataactgtggcttatttttcattttgttttcagctttaggacaatatatgataaacgctgactaggttttgtagaagttaacttctgtgaaagacgaattagaaggcttaccttgtttcacattggtagtgggcatcatttgatttttaagactcattgaaggctgaatgatgaaatcaataagtttattaaacagtagtttggttaaggatggttactaaataatattccattcccttgtatagttttggttggtattgtcgattatgctggcataatgcatcatggttgctgttaatggggaagtgtatccttgcatatacagtagtcccactttagctgtaggggatacattccaagactccccagtggatcccgaaactgtgggtagtaccaaacccaattsctgtcaattggaacatgtgtctgctcgtttcttacacccacaaatgtaataccgttgccaccttaactaagcatttaaaactgtggtcgcaacttttgcagtttgaggcaagacagcagacgatcaggaatttctttttccttgtttacattttcatggatagaagatttgttcgtactgtagatcttagtaacctcggtataagttttttttttctttccataagaagtcaaaaactttcacctttttacttaagggtagtgcttatggcttctctttgccgtatctgaattgctagcttcactaytcttatgatttsgggccattattagtaaactaagggtgactcgaactcaggcactgtgatagcatcacaatggatctgataagctagagggcaataggtggatagacagcatggatatgctggacaaagacgtgtttcacttctggggcaggacggaatgggatggcatgagaatttatcctgctactcagaacagtgcacaatttaaaacttaggaattatttgtggaattcttcatttaatattttccaactgaagctgaccatggggtaaccatggaaagcaaaaccttggaaaagaggggactattgtatttcaatacaattcagtgattttttgttgttgttgagcatctactatatggcatgcattcctctaagtggtgtggtgaacmmaacagacaaaaatcccagcctctctggagctcacgttctctcagtcaccagcaagtattaattgatgtgctcaatcggttgatgtgaagattaagaaaaatagagcagaaaaggggaatgggagtggagtgcagttttgagtgggatggtcagggaaggccccacctgatagatgacttttgagtaaagacttgaaggaggtgaggaagcaagcctaggatattttggagaagcatcctgaacccagaggaaagcaggtaaaagttttgaagggagaatactggccatggtcatgaaccgcagggaagctgcagtggctgggcctagtggccagatagtttttctcagtcaggattcctcatctatacctgaaaatttagcagataatttgagcgcctgttttctcagtgcttccattgtagatgtatagggagaagttaattccttatatacactggtcctttagggcaggagtctgcaaactctttgtttaaagaaccagattataattattttagattggcttcacatgacatacagaaagggtgtagcacaaagtagccatccatatgatgaacctggctgtgttctagtggatcttcatttgtggacatcagaattggatggaactctgtataattttcacatgtcacaaggtactctacttttagattttttccaactactcaacaatgtaaaaattattcttaccgctgtgggctgtacataaaggcagtggwccatgagccgattttcagacccctgttttaggtccagatcttgggaggccatgtgaagacttgggcttactctgaataaacattggagggttttgagcagaggtgggaagtgatcaaatttaagtttaaaaaagaagagtttcagctgttgttttgagatgaaactggaggtggagcatgcctttactggttgcattctgagggaatttgagcggtaaatggcattttacttggtagccatatagaggacagtaagagttgtatgcttttgaaatgtaaaaaactttgttcattcaaagcatttgtttggaccctrktgagattgaagtgtagaaaagcatcagaggtttttcattggtgaagctaatgatggaaaataattgagctccttactacagcacaattatgaagggtgctttatgtttttgcaatagagacttattagtgaagatgatgcaggagccatgacccagccagcatggttggtggagatagcacatgctggtggagtcactttacttctgggctacacccatactgggtgctgggtctcttaccaggtatagcagacacagccccaccctcccagagcctatctgccttttatgagtctccatccttgaattgaagatgctgaagaagggtataaaatagtctgcctaatttggaaaagacaaacttgagactttacagattgaaacattttttaaaggcatttgaagatggaatgttctgtttttagaacttgtttgataggcgaaacctgaagtacatgcagtgtttcactgatgaccggggtgctccattttttcataacaaaatttggtggcatcaactttcgaaatcaacagggcaagctactgctagcctttaggacagttaataatgcaagttttcatattgttgtggggaaagtaagctgttattttacagttaaagataattatttgtaaasstgtggggctagtctttattatatttttagatgctgagatactaggcatctgttgttctacagatccaaaataataattgtcttaatttggaatacaatgtttgctgttaaaaatattcccagggtatatggtgacaagtaaaagagttacacacccatgggaagcctttcaataattaaaatagtgctgatgacaatacctgtttagaaaactaaacaaaatttagaatgtcgaaaggaaaaacttcacaacacaaattagcatatagagggtattcaaggctaatttgttgtctttccctttatsgkttgtaggtaagattttttactgctgtggaaactacagtctctgtgggaaaaaagtacrtaatatgcttaggtcttacaatgtagaaactgaaggctgtagtaaggcagtgagttggttttctgaactagggaattagctgtgttttacaacactagaagatcctcattgtatttgtttatcataaacagaagaccctaatagtgataaagagtaaactcttagttagtgctgcctattctcacagttcctctttttcgtatctgtttcctaaattcagctcctaatgtctggactcagtgtggtgctttggcattaaggagactggaaggcctcagagcagccccagaagcaaggtcgtagaaaccatcatttatcttccccagcgcagatcatagaaactagaactcctctcctgcaaagcaagccataaaacctagaaagatcactctctcccttttgccttctcttgaagacagcatttcagaggggccctgcctcattcctgggggaggaaatgctgtggycctgctgggtttccctcagtctgctaccattggatcatttccttttgtccagtgccatttctacacagctgtgcattggtcatctaagcatcaaaaccgtttccctgggtctttgggtcttcatttctgaaggctcttgttaacctgtcttttgttacaggagtatcttccatgacctttatgatgggtgaggaaagctgccacacctttccactctgacactgtcttgtatttgctccttcatacgagcctcttacaaggtctctccaattcagtcatgtgctcttctagtgtttccttagctgtgccggtaattttggtaacttgtaggaagggtctgtgttttaaacaactttctgtcttcaggttagggcacagtgcttggcacatagagttggcatacaaaatatgtttgttgaataagtcatattacccttttccataggactttctatttctcctcatagtggctacgcaaagttcaaatgytggcccagtgttttagggctcctgtataccagcccgtcagtttccagacactggctctctgtacctgaagcatcgcagcctcacctgcttagtgccacaatccctctgagttaaatgcctttcccttcctctgtccattaagatcctgatcatccttttaatatcatctctaatctttcttttttctggtaagaaattttcttatatcttgtttttgctttgtagcatcgttctttttctgtgctgctgtagtgtattgtttatcagcattcattttcccacttttattataataaatataataaataaagtggagatagagttcagctgaatggccagtgattcaacccattgtgtctccctccgaaaaccccaataaaacctcagagcactatggctctgaggagcttcctgggttggcagtgctctttgaatattgtctcatgttgatgacaggagagtaaggtgtcccagaggacagtggagctacctgttagggaacctcccagaatgtgccctataggtcacttgctttggctgttttgtttgtttgtttgtttgtttttgtttttgttgctgttactataatgaaattgtaatggtaagtgttctgctttcctgagtttggggagtaattctagggrattatcaaacctgagggagccctggggaacctggatttctcacttgctggtctaaagtaaggatggccctgatgtcgacatcgtggtctggagagtggtgtccctgaccttgggctgctaatgcctggatctgtatccctgggctcagggctttgcatgtgatcgctcagtaaatgttggtgttgaatcgctgtttatgcttaaatgcatgtttgtgtgtttgtgtattgttttgtgaaacagtagtcatccttatgtgtgatatacttgaaaatacatacagttgacccttcagccacaggggtttgaactttgaaggatttattcgaggaatttttttaatcaagcacagatggaaaataccgtgttgtctgaatgagaaacccatctgtatggagggctgacttttcctatacttgggctccacattctcaggggccaactatagrmcctgagtatgcacgttttggtatactgggtaggggtgggagggtgtcctgaaccagctcctgagtctactgagggacagaccactgtattttatttttattctgttgtatttcattttaaaataagctggttgcaacccacttcattttcgtgattcactcctggatcattagtagcaactctttaaacaataatttttgttgaaattgtttttctgatatctttgtcatctgtacttggagtacttggctggttggtgtcaaatcactgaacttgagcctgataggctgttctccagcagggtctaccctcactggttggacaaaggcgtcaaaggatagtgttggcctttgtttttcctgagggatagcacagcccccgtgtgtcaggtgtgtaaaraaggggagctggcatgtgcccttccatccaacctaaccctgtttccccacccctcccyttttttaaaggtaacatttgtcgatcacccattgcagaagcagttttcaggaaacttgtaaccgatcaaaacatctcagagaatgtaagtaccattcakkatcttaaagaggccaacctgaactcctctgggcaggaaattgcaaaaaaaaaaaaaaaattccatgtttcttcccctgcagtggagggtagacagygcggcaacttccgggtatgagatagggaaccccccwgactaccragrgcwgagctgcmtgaagaggcacggcattcccatgagccacgttgcccggcaggtaccgtccttggacttgaagttgtgtgttttgtgtttcagtgggtcattgayagcggtgctgtttctgactggaacgtgggccggtccccagacccaagagctgtgagctgcctaagaaatcatggcattcacacagcccataaagcaagacaggtagacaagctcttgttcaatttctaatatatagagtccagtaacttgagaagtagcgaaaggattaaccagacttgtatattaatgaatgtgtttatttagggtgagcttaaccagctatggtgtgtccattttgtttcacttctggttgcacggtgttgaaagrcttgcctgactttggaatttacttattaaaatgcacataaaagctaggtaatttataatgagagagcctgactgtgmgctggggctgagcggtgctctgtcttctgttccttcctgcataatttttattaaacatttaggccatagtaatcatcctgctgatattgcaagtttgttgctagaatgaggttatataatatatacaaaaacattttttcaactgtaaagtgccttagtaatatagggtaataccagcaacattatggatatataattatagtctattgggccacacttaagtttggagtctaataaagtcacaatcaaattctgcaatttcaattgaagataaccttgtctttatattataaattagaagctaaagttgatttttctaagagttctttatttaaatgaagtactctgggactgaccttttcggaaatggaatcttcgttggtcaggtgattcaacatttttatacaatttatccatcctcatctcttcaggatttgcataccttgccagtttctactggccattgttgaaaatacatttatttggagaagtccaaagccaaggggctcatggggctgtgaggtccttcttgctgcatcgtcctgtggtagaaggtggaggagtcaagagagtgccccagagtgagtgagagcgagaactagaaaaacgggaagagggaaacagaggagagagagagagaggacccatcagtgtcaggagcccactcccaagatagtggcattaataaagatcctgcgtctcactattgttgcattggggatgaagtttccaacaaaggaactttgggggacacatccaaaccataacataggatttaaataattttacagagttcaagagttctgctactgaaccgtttgagatccctgttctgaggtctcatcactttccagttttagcaggaagagaagtggcaagtggcaggagtctgcagattggggcctgcacctttttttgaggcaccttttttatgaacagtgtttgttggaacacagccagactcactcattcacctgtagttcgcggctgcttttgtgctagagcagcacagccagagcggcctggtggccacaaagcccgactgtctctgcagcactggttttttatatggsgtttctagttgtttttagtagtaggggtgatttgccacaagctgtttcatttatagctgcaagtggaaatcctttattgtgcatttgttacataagttatagctgtttctttctcaattattgtaacatctaaaaattatgtaacagttactaagtctttttttatgaaaaatttacaattagtccagaatttaaaacaagtttagtattaaatcctagggaatttctcacataactaatttggagaaataatataatactgttcaggcatggtggctcacacttataatcctaataacactttgggaggctcaacattgcttgagcctaggaggtcaagaccagcctgagcaacatagtgagacccatctctaccaaaaaaattttaaaaattagctgggtgctatgacatatgcctgtagtcccagctgtttgggaggctgaggtaggaggttggcttgaactcaagaagttgaggctgcagtgagctatgatcacaccactgtaccccagtgttggtgacagagtgagaccttttctctaaaaacaaaaagaaaaaattcagtattgtacttattctcaattttgaaataagtcaatgtcatgggagtgttgacgaaatacagtcttttctagctactggaagtgcatactaaaagccaaagtttctcattttttagaagaacaggtatacactttccacctttgttccgcagtacgtatgtttatgtttcttattctgccattatttatagtagtcgaaattcacaaaataatcttttcatttgtattttaagtaggtgtgtttatagattatatcagaaaacaatcataagctttcaggttacaatcagtagaaatactgagtggcattctcttctgtgtgaggtttaaattatggatagtcaatcaaaataaaggaggactgtcagttatcactcctgtgtttctttcttagtgaccacctctgaccacccaacttaatacttttactcctccctgccccaaagctgtatgtatctcctctctgctttatttcctccagggcatctgtgcctcctgtgtgttgcctgcccccatgtggaagggcagctccatgggacgcggctctgtccacttagcttggtgtttgttactggggcccaggatgttcagtgcttgtggaatgaaaaatagagtagaataatgaaggggattaaatatgtgacattttagtatgttgactgtattatacactgctactaaggaattgaagccgatgtataaacattgtgtctacacattatactattttatgattattgtatggaactttataatacaaaatttctttgcagtacaattttgagaaataggttaactctattttaacttaaaagtaccctaaaaattatttaattgtttattagtgagtaacaggctcaaatacagcagttttttttttcttttagtattgctttgcatcctctaggcttgaatggtataaacactgtgttttgacttcttattcaattttagattaccaaagaagattttgccacatttgattatatactatgtatggatgaaagcaatctgaggtaatcctgtttttgaagaatatttctgttcaactctcagttcagcagtgggccaagtaatttgttgtccagatttactttttctattttaaaggttttaatagtcagtgatggtcaccatatgtagaattattttatttagaacagcaaaaaacttagtaatctagaattgtctcttaggtatttacaaggaaatacaccttagaaaagggaaagtctagttgttaatagcatgatttaattggaaaactagcttggctgttatagttttgtatcaagcatattgttctgcatgagaacgattttgatatttttgctgtaatgattcctgggcagggcagtgttttattgattctcaggtcaaagctctgcaaccataggttcctattattatcccatcttgtaaaagaaggaagtgagaaacggtaatgttaggttatgtccccgagttcacacagctagcatgtggtggatgtcatgggatttaagcctaggctcagtgaggaagggccctgctgtatgcacccctgcctcagtcaccaccctcctgacctgccccagtcccatgttcaaggcgtcatcgggaacggatcataatttaatgtcactccaggattctgacttgcatcactacttattcataaatatctcatgtttttgatgaagataaactatttgtgcttttaattacttttgtacaaatgaacagatagggatgcaccagtttcaattattttttattaattaggaccttcattaaaatgcatgtattttttaatttttatttttcagtccttattctgttctcattgtttttgctgacaccatagcccataggcatcgtaaaaacacctttttaggagaccccatttgctttgactggcactgagcaccgtgtttctttgcgtgtggggcaagtggagttcctgcagcctcacatttgcacgtgctgttcctctgcctggaagctcctccttgcttcttgggtcattcggctcctatttgcccctcgtgggtcagcttaaattcatttcttgatagaggtattctgctgccctgtcattaggccagattgtgcattagacttaggcctgcctgcagttctcattcctgcacctaatcctgagctgtaaaacttcgtgcaygggagctcttggctgttccgttcccacataaagcacgtacctgactcatcaactcatctgtcgcaggtgctcagtcgaaatttgttaaataaatggaggcgcttagttaagtttgcctttttcttttgtagcaatgtgaaagctaagggtggaagtctagagtgaagctgagttttcagcttgggcagaggcttaaggaataaaagatggaagagtaattaaggagtgggtcgtgctgtgggaagtgctgtgtcaagacacctgaggatggaattggtagccctctgttttgggactggttcagatggtgttttgggttcctttctatgacctttatctctgaaacttgattgtcttaaaatgtattttgtgggagaaaatataattattgtatattttgtgtaacagaatcagtgagaataagctgctgtcgcaaactgtcttgcctagagagagggcagtggcatacagctgcagaaggggccacacgggcctgctgagtgttccgtttcatttcaaattaggtcattctgtcttgattttgatatggatgtttcagaacaccctagcagatgtccctgtttaacttgaaaccgtagatcagaaaactaagttcatatttcaattttacagagatttgaatagaaaaagtaatcragttaaaacctgcaaagctaaaattgaactacttgggagctatgatccacaaaaacaacttattattgaagatccctattatgtaagtacagttcacgttttagggctaatatgaagacccaacacatttgtatcctgccatattaaataacagatgagattgtgttaaggatgtttttgttatgcaggttttgccattttcttctttttcctgtccatttagggraatgactytgactttgagacggtgtaccagcagtgtgtcaggtgctgcagagcgttcttggagaaggcccactgaggcaggttcrtgccctgctgcrgccagcctgactagaccccaccctgaggtcctgcatttctcagtcggtgtgtaatcacgttccagggcccaaagcccagctctttgttcagttgacttactgtttcttaccttaaaaagtaattgtagatggaaatcagttgtgtttggcaggagaatcaataaaaatstttgattcagacagcttatggggtattttaagcattcttagactagttgaacatctcactttgccccagttacaaaaatagtagaacaagcaacataaaacaatgaaggaaaacctcacttgaaggcccaggtcaacatctaagcctgttgagacttagataatcgagtctacctcttcagtaggtttgtgtggatggcctggagggcaggtgccctctgctccccagtgctacctctctcttccctagggccttttgtggattgacagtagtcccctccgtaggagctcacagtctagattagaagtgttttaatttctacacacccatagtgcacacttgtatattgaaaagatagggaagagagaaacatttatggaatcagtcgttggcaccttcaatacttcatgatttttgtcgagtttacttcatgaggaggtcagcccattggctccmatctgaaccactttgcctctgaaacttaattacatccagaaagraggamacttgtatgctagtctatggtcagttgaggaatatgactgtttttatatgcacatgtaacccaaatgtccaatataaattggcttattttttaaaataattttaaaagttgggaaaagtgttattatttggcatgcttaaatattgaataagtattcttcatcagcatttaataaatgtataggcagatgtaaggtaatttctgtgtattttgagataatgtcaaaatcatgaatatttcaaaataaactggggagttataaaaatacaactagagatataaatctggtgtctgcctgtttttttattgacaggtaaggaagcatttgaaaacattgtattgtcctttttacatgatctgtgatgttaggtgtgcatattttatcttcaggataaggaagtaaaatgatgaaaataagcacattgctgccccatgtcatcatgtctagtttctgaaggaagtttgaggttctacagctggaactgtccttgcccagtaccatcctctggacatgttgcctctacgctgtgccctcctgtgcagtgatgcacagctgcctggccaggacatctgcactcctgacctcagtatcatgagggtcccaggcagtgccatggggaggagacacgtttgatccttgactccctagtatctggaggataagctgttgccagatgaaagtgagtagtttccccactgtaccatgtggaagtgccaggctgtcttcataggaagaaagtttgcaaacccactgagtcttgctcttgttggaattactcagacatacagaaaactgaggggattaaatattaatagattggatatttgaacatgaaatccttaaaacataaaaaatggggaaggaaaggtcaagtaatgagctgtaattagaaaacaggattaaataagagcacttcaaaagttacaccctgttctcttcattcagtaattgcttttaatctcaaagtcaaaatttcttactcttctattcctttatgtttggaaataaaatcctatagtttttctttaatgtttatctctataaatacagatcctcaaacaaatcctaggactcttgactattctgtccttatggctacacccagacgataccatctgccgacaagggctcatatgaatggagaaactcattgctttgccgaattcagctttttaaattggatccaattagatttgtttaaaatacatctacatctaaaattctgagactgcttagaagtcttaaggtttctcctagttaagcaatttcatgattacaaaatcgcttgggaaataatggatacaaccttatttggaatatttcccagcaaatcagggactatcttaggaaattatgtcaccaatatatagtagcctttactttaaaaaaaatgctaattatcccttagagaaattcttaggcttcaagttttcatttgtttatggctttcatattctatgaccttttgccagtgtcatgatctctcagtaaatcagaagtcacgaattcccaacagtgaacctgttaaagaggtagagagtcactttgaagactagtcattataacaaacacttcatttattacttgtgtttatttacactatttacatattgcacaatagctggaatactattttacatttataatacaaacgaccaacagaattagccacagatttacactccactgtctctaaaacatgatcgaaattttaatttttcatgccgttccaaataatactctgagaatttaacagtgaaagtaatacagaatatcaaattatgttatatgaaaatatactttaagattctgcttatgtttctaaagaaatattttttgcgatttcacctaatgaagacaatgaaatattctgtgttttatagcactacacgtcaaatgtggagcattccttttgtgttttttttttaaataagtgacagataacactgtcaagtacactgatttatcgaatatatatctgcaaactgtcaacaacatacaaaactcaaaggacttatggaagagtctgtctgcaaaaataaatctcttgtccatgaggggatgtgtataaagatagttctgtttccctgttggtttccaaggcacttctcatggctcctggtgtgctgctcctgtacggtctgctcactgctgaaaacaaatacattgcgtgtgatatgactatccacacttcttaatgtcaattccagaagacctgtcacttcagttaggggacacaacatgtttataaacataggcagtctcagagtgcatctgtatttctctgtgatccaaaaagtgtagtctattgtatttttaaaaataccttctttctgcagttgttacatggctgcaatgctaaagcaatgaaaatcatcacagatacatgtggatgctttattacagcttgaagagtgcttagtcttacatgtgctatcagaatcctcagtagtctaggccacagggattaacctggcagttctgcaacctcagtgttcacagggttggtaaagctaataatcgagattagacatttgtttctagcattctttgttggaatatctaaaccattggtattctatttatttttaaagaatgataaacttcaaggttactaagattaggctgcatttgggagagtacaccatgtactcactactcaaaactccatttctttgacaatattccagagctcaggcttctgattaactgacctgtaagtccggacaatgaagtgtatctgtgactgttagggagggttggtggggacattgttctctttggcctgaggaggtctattaatgagcttcagaacgcggcaaatggatttgctctgaggtgaggagggcagagcccttcctgctaaaggcctgcttttctcaggctctgggcctttctttacaaagacaaggtcatggtttacggtcttgccctgctgtccttgtgtgtcaggacagaagtgcatgtggcaggttaaccagcagaactgggactgcagggcctgcctgatgccacaccgtcacacgagtgtgggcaccctgggacacctgccctgccctctggtgtctcactgaggtctgcaaagcacagagaaagcccggactgtatctacactgtggtgaccagccacagtaagagtttgctgttgctgtttaacaatttgttaacaccagtaacaatttgctgttgctgtttaaaacttttggaatttgaagaaattatctttaaaaaataggagttatgaaattatagttaacagggtatcaatattttaaactttacctatctcttggccaaaatgaacccagttacagctgtgacacctgtggctgtcaagcaggtggccttttggggacagaagcttgcgagcctgggccttgtcttgttacctttacctgcatctcatcgtcagtcaggctctgatgtggttgtctggtgatggggagagtgatgtgaagagtgctggggactatcaaggggattctgccacagcttttctgcagggcatcactgtggcgtttgcaaagcaggacgtgcgcacgcagagacccatacaggagcctgagtcccactgacatgaccacgtccttcagtgtaactgcacctgcctccagcagcagccagcggaggggaggcaggggtcggctaatgggcatgtggacggagtagctcttccagtggctgagacagtggggaatttgctctcctcacttgtaagtaagtggaaaatttccaaggatgtccctggcccatctctgggaacactgtgtttaattataaagaaatacctaaaaaaaaaaaaaaattctcatctcccctggcatatcaccttgggtgacaggaatgtacatctgttcactgatttaaacagaagaaagtctgtgcgacacataggcagtggatgagctgctcgagagaattggaaagagcagggatgtggggagacattactacacagcacttcccagctttgactgacattgacaccttcactatctccaaagaaaaagtgcagtgaaactgtgcaaaatgcagtctcaacccgccattacccactggcctccctcccccagtgccattcctctcattagcagcagtttcttctactgggaaagatggagtggaggatgcatgggcaggacccgccatgcctcctgccggtgttggggtcatgcacacaacccttctgctgctacctaaatattcataagcactgcctctgcatagagagcacatctatataggaaagagcactaccctaccctcatccattttacatgagagaaactagagtaaccactataaaaatactcccttttcatgaatgtgctccggacagctatcaatggacaggaagcctgtctttcttgtgctggtgtagccagcatctggcagtgcccacatatacaagacacatagtaagtataaaattggtgaaattacagttgcatcctgctgtcgaaagtgactggattctgtggcatttgtgtcaggaaaataaaaccttacccttcaaaacatccgctgatggttggtgttaaatgttgcatatcagccctcaaggggccaaggtgcaaagtttagttcataaacgtggtatgcatttacatttttactattagaggctgtgaaaaaaaaaaaccattgatagaaacatttaaagaggatagctgttctttatgagcttatgactacaactcaaacatgtaccagatgtgataatctgaatttgcatggacaatgttggtcatctactcacttgtgttagtgaatgaatgaatgcctcgaagtaaacggacaattttagtctgttcctgacttacgcactcagtcacatgctgacactggctgacttgctgtgtttcagagcaggacccacttagtgcccgtgtgccatgcagtgagcagttaacaacagctgccggggccctgtagacaagccagtagggtggctttcagcactgtgagatgagtgttgtgccatctctacttagaatatggctacttcagccaaagaatgagtgttcctaaactcccatgaatttttcatgtcccaagcgggattcccatctttggtatgtgctccagtgtgtgtctgtccaagcttaccttatcctccatgcacactggactgacagccagccgggtaagaagcctggcgcatcttttatagtctacggtgaaaatatatcagactcttgtcagttacttaaaaaacaaataaatcgcattttttttgcaagtatatcagctactaaagccatttatttcttcaaatatctgaattccctggaagcaatacggagtctaatctgcaggcatgcattctaagttgttgacttaataatttatggtgcttcaagggcttgagcttcaatggcagaagtcggatgatgtaagtggggcagcggagggaagagggacagacacgaaggctgcatggctgagctggctgcccattgcttctctcagaaataacttcatttcgcttcctacgtgacaatccttccgtacccttgtgctactttcaggtcatgtgcaggctgaatcccaacttgagttgaccatgggacaaagccttctgcctgtaaattctaaagaaagtgggtcaaaagtcaggcagcagagcagaggcctggagtggatggcgagcggaagcaatgtgcccgtttctaagcgctggctgatactccttggtatcgtacacagtctcccattccactattctgaccgtgctgcctatagaaattaagaaggtgtaatgggcatggccataagggaaaatatgtcctcagggtgaagatctatggaaagctgcaatagtttgtaaattattacagtttatttctcaataacaaaatcctacttaaaagtggaagaatttatacccaactgaaaatctgaattgaatgggtagattgacaatgacaaatgtgtacgatatgttagttaaggagccagctctacttccaaaaatacgcctcctaaatatggcatatattgttagggatttttcaaacagaaaatgtttttcaaagggccaaacagtggcactgggtcatctgaccgcctggctttctctttcataagcagcaccatgctttttagaatgtagttttcctaaacagattccacatcatggaggcagtggaatgtgtgatttcaatggctgatctaatcaatgaagacttccacttgggccatgtccagggtcccagctgaccacatcctgctcaacccaggtgttttcagcaatgtcttgcaaaccttcatgtgcagaccaatcatctggggatcttattaaaatgcagattttgttcaacaagtctagatgggacttagttctgcattcccaacaagctccccatgggaccacactttgagaaggcactaaagttccttcaggtctgata

SEQ ID NO: 93935 - DNA, 29298 bp, Homo sapiens
  misc_feature (1)...(29298): n = A,T,C or G
cccggtgcccagaaagggcagccgggatagtgaggttatttcctgcccgcccaggggcgccgccgaaggatctccagaatctgtgctcttcggtgcagccagtcctggggagtggggcgtggcgttgaaggggtcggccggggcacgaagaagctgtatcggaggcgtgtgtcctgggggttgccagccactaggacttgcagtgtcaaaggctgggccagtggcccatggcctgacagtgtctctgaggctgcagtggccccgctgtagcgcaagctgactgccccaggcagtaccacatctgtgggggagggcatcagcgtgtattcaccattgagggcataggagccatctggcagcttcagggccaagtagatgctccggtggccagsgtttccctgctgccggacaagaatgtgggtggcccccgcggggatagtgaccacattgttgtatccgtacctgtgtggaaggagtagatggggagctcaggatcacctgaatcccctcagccttctgagctgtgcttatgtgactgtatgtgtgtacatgtgtgtagatggctgtcacccaatcctatgtgagctgttcggtctggatcagagctacatgcacatgtgccctactgcctcttatctctggacctttacacccactgcccccttattgagttgcccttccaagccccacttccttggtacctgtctaattcctaccctccttctgagactcagctcagaggtcacctccaaggaagccttccctgatgcccacaagggcactcacaacaccctgttccaacttcggatgaatacatgggaaaccgcactgtagctgcctactcgtctatctcccgctagactgtgagctctttgagagtggaaacagtgctgagttcccctctgcatcactaggacccagaatgtccaggaaggtagagggaggaatgatggtgaaagaacctgaatttcctgaaggagcctgactgcttgctgcaaccagaacsgtcccctccgcacaccatgcacttgtcaaacttcttcttggagccaatgatgcgatcacagccagcatggatgcatcggccctggacacagaccgaggagctgtccggggaacagggggtcccatctaccacctgaggaaaagagaaagaacaatgctgaaggttcctcctaagtcaaaaggggttggtaaatcaaacgagacccatgtcccatcagggaagcaatgttgtcggaaaagttggatgaagtaggggatgtagatgggtgagtgccggccaccatgtgggtgataatcataacaataataattattatcacatataacatctagccagcattttcagagcactgagtatgaatcaggcagcatgctaagtgttttataaacacaaatgtaaatctcaccaccactatttgaggtttttagggatggaacgttgaggtttagaaaagctaaagaacctgtccaaaagccacacaaatggcaagcagaggagccaagatgggaagtgcagtctgtctggtcccagcaccaagccctaaaccttgatggcactgtccctaaatggacgctagagggcagccagcctgtagaaattctcaggttggggcgaagggagcaaaatgctgctggggcttgtttttctttgtgcagccttcaacccaccaccctatcacagagagggagtgtagggacttcagtcatctccaggaggcctgtccattgagggactggctgtccaggagctgaatgaaaccaccactataatttgacagaggagcccatggaagaggggtgaaggacttgtcccaaaggccacacattcgattctcaccaaatgcagcattagaagatggggagtcagaggaaaagaaaccacgggaaataggataggctagagggacctattggccacatatctggagtctggggctcgttttcctgatacccatgtacagataagtctgagtggaatcctggactgggctggcgtggctgtaggaacagggttactttgggtgatctttgttatcagaaagcagagggagcactgcgggtgtgtgtgaccatagacagggcctgggggtgtcctgaccctcacccgtggctccagcacatagtagtagcccagtgccngggcctggcaggtgagtttgcactggtcctggggggccacgcctgtgtagcgaggaacccagtccatgggccctgggaagctcttgaagaggtcggtgcggtggttgtaggcagcacactgctcctcgcggaaggtcagggctggaggggtaaaacagtcagagcccctccttccttcctcacatcaccccacatccctccacccaacccctgagaactctagacagcacagctctgctcttccctgcagacggccaaggacaattcccagaggttaaaggcactccccacagcagcaggggaatcaacacccccttggtcttgcactcaagggacagtccttcctgctctactgtcccctcccaagggctcccatcccccctactcctcacctgagccagttgggcagtcctcagtgttgcaggagcggaagcgggtacggcrgccctcacagtacttgccaccattccgggggacaggcctcgtgcagtctcgggaggagaactggacaccacccccacaggtccgagagcagtcaccccatggtccccaaggaccccagccaccagcctgtggaatctgcaaaggcacagaanggaagtggggcataagtgaactctctcctgggcttaaggccagtccccacacccccgggccctttaccccacccctgccctaggatctcacattgaagtcctggagctggtccatgtggaggcagcgaccacccatgcaggcctgtgcgggcccgcagggtgtgccatcggcccagggcgagtgtttggtctggcacatggcatggccattgaggtggccagagcaccagagggcagcacagggcggcggcagctgtggacaatggcgtgagtcgggcccgaaggtcagctggcactggcggtcagcatcatagtccttgccagggaaagtcacaggcagatgcaatggagcctctggtttgtctaagagacagtgccctgggaagggggttggggcacaaagtcagcaacgggctgaggggagcattcaggattgccagcagaaagcttaggctccctggggcctgatggagcctagaaaaacaatcctaggactataagaggatttaaatttttgttatttataatttttgttttaattacttacttttttttttttttcctgagacagagtcttgctctgtcgctcaggctgcagtacagtggcatgatcatggctcactacagcctcaaacttctgggctcaagcaaacttcctgccttgggctcctgagtagctgggattacaggcatgtgccatgtccagctaattttttggaattttttgtagtgataaggtcttgctatgttgtccaggctaatctcaaactcctggtctcaagcaatcctcccaccttagcctcccaaagcattgggattacaggtgtaagccactgtgcctagccctgtaagaggctttaatgggcagctatagtttattggatgcttattatgagatgagcattggctaaatgcttgaccagcactatttaatcatggcaaatacctatgagataggtaccgctattatacttatctgacatatcaactacaaacacagagaggtgaagtaacttacagtcacacatctacacctgcttaaagaacagaataagaggccaggcatggtggcttaatgtctgtaatcccagcactttggaaggctgaggtgggaggattgcttgagcctaggagttcgagaccagcctaggcaacacagtgagaccacatctgtatttaaaacaaaacaaaacaaaacaaaacagagtaaggataggaactcaattctgcctattctaaccaactatagaatatttgagtttgcttctcatcaacatctctgcctagtggcagtcatcctgctattcttgcatacctcactgcgtgacaaggtaatcacctccttcatagccagcccattccagtggtggacagttctggccctcagaaagtcagttctaattctactragccaaaattcgcctcctctagctatgctatttattctgggaggaagtgagaactacacaaagacagcagcatttctcaccccttcccacactgcagaggaagcacacttgggggaggcaatttggtccatgcagaatgcagcggaagtgagagtgccctggaggacaggaattgagtgctacccagggaaaggtaagtgccatctgcttaccatagccattgtccaggaagtcagtgatgaagcgggcactgcagggggaccagggctcctcaggatccacatgagccatcacaggggccatgacatggcgagaggtgctcaaaggcccattcaaactgatgcatggcttggagttgtcatggagcatgttgaagacatgrcctgtgggagcaaaggccctgataggatctgagggtcccttccccatgccctgagggactccataataaatctggctgcagctgtggatgatcagatccattacccacctcaccctgcccccagtcctttcctttatggtactctcagggctcccagtatgtagccccgtctctttctctgtctcctcttccccaaaatatactcagggtccctccctacccacttttccttatagccaacattcccaactgtgaccccacccattgtctctgactccccctccaaatacacacacacagacacacacacacacacacacacacacacagaggagttcacagtagtttcgaccaactaatttatttaatagaaaaatgtaaatgtatgtctacacctggagcagagaggagtaatagccctatacctaggcctgggggaagaataccttgggacccccattaacactgtggtgaacttgctaccccctcccccaccttctcctccctaatacctttctcatccacccctactttacccagttcatgagcagcagtgaaggctgactggagcccatcatcctccacaatggcacagctccgagccgggtcacagacggtgcccacatcagccatacccagcgtgtcgcaagtggagactccacacaggtcctgtggagagggatcatagaaggtgcatagacagccaagacacctgggtccattgggttgagatccagattcccggggacctgggcactgaggacccagcactgtcagggcctaggtagccacacatggcagtgtggctggggcaaggcaccatgtcacacaactccaggaacatcatttgcatcatagtctatgtagtggcgcttcttagaattgtgcagtgcatggcctgcggtgctgactgsggcctcacctgacgggtaaacagaatggctgtgtcaaagtggtcagggtccgagtcctcaggggtgttgaggccccgctgccaggcacagaagctgcgcagggtctgggcagcactgggccccacttggggcccctcctcgcctgaccccaggatcactagccgagtcaccaccaagctgacaggattgcggatgcttgggtgcttgaaggccttggctgctgctgccatcactgttagcaggtagcgctttagccccgcaccgtggaatgcggccatcttgtcatctgccaccaccagtgtctccacaaatctactcagtgaagcaaagcgctgtagagaaaaagggagaggaagatcctgaaatagcctctcagacccatgggtcggtcgattctccaatccctcacttcctgggtctggaactcagcatagtcagctgggccccacacaccccacgggattcctgactcctggcgggtcttggttgggcccttcccccaacgccaaatctcagggcttttgtggtaactctgaggagtcagcagctggttctaagaaggggaggagaaggggacgccacatcccagggctgcgggagccccagaggtgaaagcagcctggactgccgtcaggagggactttggggttctccaggcctgagtgtggctggggcctatgggaccagggctagagggctgggctgcaacgtgtctgccctgtgtggttggaggaacgattcagtcagcagctagggccagggccagagctcagcgtggcggttgtggagggagcgtctggtctggattaaagctagagagggaggagggaggagggaagggaagaagggggagaccaggagtgggagggaggaaaggatggagcctcaggcagcctcgcagtccggccacagtgtgtgaaggggattgaccagaaggaggtatgggataccctccctctcttgccactcctgccctagtttgcagtttgccacagtgattttaaaggcagcakcagaagccagacaccaagccctagggcctcaaacctgactcctatagctgggagtgggggatgaaaatcaaatttggagcagagaaaagagccaaggccaaggggctgttaggagacctttactgctggggactgtgtcagtaggagatgccatggccaggaaggggtggggtggggagagggagcagttattcccagcccagagtctgtgacycacctctgagaaccctcggtgggtctggctaggagaagggtgaaggggagaggcctgagccttaccaagaaaggaggctcatggagaaaggaaaggcaggcagaagggagggaagcagaacggccagaagtgnaagtgggtggagagagggtgaataggggtcagtaggacagacatggcgggaggacaccgcaggacacagactccagagatgcctaccttggctcttcggggtctggggctggggcttccaagaggagccttgacgttgcacatgggaccttgaccgctggcaggactcttccggcgtaggatgtgagccccaggtcccccagcagagttaggggtgcctccctccaggggctggaggtggagttcagccccccgatattgtaacacgcctaacagggctcccccatcccagtgcagagatgccacygactccggatctccattgatggtgccagtcaggtaggtgccaggctctgctccacccagcagctcaggcgcctggcccaggtactgcactgtcagcccctcgacctgcacaccggagtcctgctccagctctagtarcagcgtctccccaaaggcctgcaagcggcacaacagcctggcaggggygcccgagccaggcaggacgctgccgttgagcttctctggaaacacgatctcctcctcccgggggagggggctggccagccgggctgagggcaggagagaggccagcagtagcagaagcagccacaccagccaggagagcggcacaatggggagcaggaggcagggttgggctccccacagccagcgccctgccaagcccctcccgggatgcgagcctgtctgggacatggcactggtactgcagctgggagggactgaggccgtctagggcaccaagtcctccacaccctagctttggaaagctcctctctgtagcctgggggcttggactcctgccaaggtcagaggcaaagttttcagaagggctgaggaccgttaaaggaaatggagaaaacttagtccttgggcttgggagaggtgcccaggggtctggcttctccaaactctcctcctgagccctcctttcctggatctttgtctctccctgcctgtgtcttctgcagcttctctggcctctccctctgtaggactctgtctgggccgcttctgtgcctgccctgtctctgccttcttccgctgtgcctttgtctctgtctctttcctcctctgtctctctcgtgcatatgtgtctgtgggtctccctgtgggttctccccagcctctctccgcgccagctcttttaagcatggtgagcctctgcgattgattggctgatctctaagccactcagctgagctctgtcggtgggactcagatgggtgtatcatcgcttcccaaaaaaatgggacttgcccaggggaggggaatctctagcagccgaatggataataggcactgggccagctgatgacatagccttttcccaaaccccacaatcagccctcagctgtctctttccctttttggtgggacagagccccaggagaggcagagagtgagggaaagggcctggccggcatgcacagataggatcackgtcctgggagaattcctgctcttatagtctaacctaccatggcttctcttttctcaaggctccctcatgctgccctttggccctagtggctggtttccagggctgaggggactgagtgagctgcctgagaaaagagggtagggaacaggtaaggaggcatcaagagggaagaacaaataaaagaggtagcttgacatggctcaggatagaactgagcagctgggaagagtaaaaaaggcagaacattgggggaggcaaggagacagtgatcagggagttgactgcccaaaggtaggatgatcctgcttggaatgaacataacagaggcggcagatgacaaggcaggaggggttaacgacttttccttttatagaaggcggatccagggtggcacctcctcttttctaacgtcccttctctccctcaggatcccccttcctgagttaccactacccaccccctccaaagcccagaacagccattccgcctccatttccccccagggttccccctccccacttcctgactccccatttccctggcccagctcccagtagcttcccccaggcttttggccctgctcctacccactcccaactgccctaaaccctcccccagcctcaagtcagccagcccccagcataggcaagacttgctctcaggaacccagattcacccagtatcaatctgggagaatccccacctggctcccaccatccaccccaccttgctctgagaacccagtggttcctggaatatctagtcatcttttctttttaattctccctggggcagggagagggtggagacagcattgtgcatatagggaaattagggtactgggagaaatccattgcctggggtggggaaagtggctggggaggaagaggtggtgttagggaaaggaagcaaattattcctttggctttggataggagggaactcggaaaagaggtcttgggtatgaactctcaaggcaaggaagggttcagaagtaggggcaatttctgctcaccccatcctctggctgcttgtttccccaggaaatccccaggaaggagagtgcagtcagcagtctctttcctttcccagaagtggaccacctcctcttgcctctattyccctattcactctgctttgtcacctcctgtcccccgcatatcatatccgtcagaatacttcctttccccctcccttcctgctcaggtcggtaatacctgccctggtgcctatcacttcctggatcacccacccccttgtgactgccagacccacctcttgacccaccacttgcctgaccctggttctaagcmaacggggctgggactagaggagtcggacaaagggtgggagaccagaaggggcaggggcaagaggagctatcaccagagaactctactgcccctttccactcccctatttgagatgaggacaaagggggtgactaagcaatgaaagacaaagggctttagagtggctgcagcagtgtgtgtgggggtgttggcagcagggagaaggcacaaaagctgcagtgtcctaggcagcccctcaggagccccccaccccagtcccagctcaagctgcctccagggccaagcagcccaaagtctatcctgacttctcycaggctggatcaaggcaaataaatgcagtccttcccatcccccaccaccatggccacatttgctgtgtttcaacaatagaaagaaggcccagggaaagagcaaggaatgaggacaacagagggaccaaacctctgccctggctctgtggcagctgccttgtctagcccaggtcctggtcagttcccayagctaaggatctggccccaccctttggtacagttcccattaggtcaattcccaggccagaagtctggctttcccctctttctctgcagtgaagaattccaccatctctgcttcctggtctgtctgcctcaccctgctgcrctgctggtgggctgtgtccctgggatcctgtctaggggatatctggggaaggcctctttccaggctcagagttggagagttgtacaaactctacgggtgggtggcccagctggagttgggcttagaggcagagggagaaaacaggaactagcctctaaggctggaagaatctttgtccatacagaattgtgatcagactcctggtgctactacatttccgtgctgttggccattacccaggagggctatagcagggtcagaaagacgttagggaaaagaggctgacgcaagacggaagtggggtgtgaggcatctctaagggcgcttcctgggtctgtgattctgtaggttcgggaagcctggaggatgtcagggtcacccacagaggacctccactcccccatctgggatgaggtggctcctacacaccccgacactcccctccgcaccaccaatgccggcggccttggcatcctattcttttttgttttggtttggcgggagctctcagacccgcccagccccacttaggctcctttctccaatctcaatttatgacatctggaaattagctggctttcccaactcctgtcttttggattcagtgatgggaaagtaattggcaaagcctggggctaccctataagggcagggctcagatacaatccgagagcaggactaaagcatgagggcggccaaggcggaagggagtagggaaggaagcgccgcgcgtttccaagatacgcaggcgggctcggcgagagagcacgaagtatctgccccacgcaggaacggcaattttcccttgctcgctcctagaaaagccagccaggagctgtgggaggaaacgccctcagtaaagatgaccgcggtcactgttatctaaacgcaagtgaagccgagtcacaggacccggatgttgtcagttcgacggtaaacgaccctgccagcttccaagagggcggcttcactgtgcgaataggtgagaagccaagaaggaggcgcgctggagttacttccgcccggttctccttcccgcagtctgcagccggagtaagatggcggcgctgagggctttgtgcggcttccggggcgtcgcggcccaggtgctgcggcctggggctggagtccgattgccgattcagcccagcaggtgagatcgagggcagctctcgacacactttctccaaggctagggtttctcaggttggggacgctttactcccccagaaaataataacccaagcctgtgaccccattgtccatccctgatttcttgggctacgggatgcagtggcgcccactctggcgagggaggggagagggtctagagttcgttcgtgccgaggtgaaatcagcggagtgggagactctgctttttagcttcagtaatttgaatgcacctctyctgtcatacctgagtagagctcagccaaagagccagaatgctcgctgtctctctgtcgttgaccttgaacaaacacttttctcacgttcatattcacctggttgataatatcaatatgatgaaaatatgaagaagctaggatcccaaccttgcatgcccaggggtgatgggtggagttattccaggaataatttgttagtaggaatggaacctctagagttccagcttgttttgccgaagctacattaacttcagatcagtgacttggcattaaaaaatccaggacattggctgggcgcggtggctcacacctgtaatcccagcactttgggaggcctaggcgggcagatcatctgaggtcgggagttcgagaccatcctgaccaaaatggagaaacccccgtctttaaaaaaatacaaaattagccgggtttggtggcgcatgcctgtaatctcagctacttgggaggctgaagcaggagaatcacttgaacccgggaggcggaggtttcagtgagtcgaaatcacaccattgccctccagtatgggcaacaagagtgaaacccagtctcaaaaaaaacaaaaaacaaaacaaaacaaaaaaacaggtcatccttcctgggtccccttgagagtgaatgggaacacaggaaccaaacactgttcaggccctttgtctaggatctgtctttgactccccagaggtgttcggcagtggcagccagatgtggaatgggcacagcagtttgggggagctgttatgtacccaagcaaagaaacagcccactggaagcctccaccttggaatggtgagtgaccagagttgctgtcccaacccacacccatccctgcccccagctgatttccttttctttttttgagacagggtttccctctgtctccctggctggagtgcagtggtgcgaaagtggctcactgtagccttgaacttctgggctcaaggcaaccttctgtctcagcctccccagaaagccgcaacaacaggcctgtgccaccacaactggctaattttgaaaattttccttttgtagagacagagtcttgctatgttgaccaggctggtttcaaactcctggcctcaggtaatcctcccaactcagcctccgaaagtgctgagatacaggcttgagccaccatgcctggcctccagctgatttctaagtgctcttgagctctctgtcttaggcaaattttagcccctatcctgtttgcttctttcaccacgaaattcaacagacataatagtgataacaacaggtatttgtgaagtagagaaggaaaggaaggatgttgcagaagaaaataaagaatgggtcccagtaaatacccaaaagtccctaccaatttaaatattaatgccagcttttcccatgttcaatatatttcaggttcactacattatctccctctccagacaaggtggtggttttcccgttggtaaccaaatgaaacctacatgaatacaaaccattttttttcctatcaaaactagctcttccttttgacttttgattttgatcagtggcaccctcattctcctaatccctcaggattgaaactttttagtcatctttggctgttttatcttgccctccatgtctatgtccagtaagttaccaaaccatgtagatactttcgtaatgtctcatatctggtcatctctcccttttaatttttattgccatcattcttattcagatttatcttgtattagaccctgattattttaggagtctattcactgagtttttgccgctgatgttgtcccctttccatctatcctatacagtgtcatcaccttcatcttccccaaacattattttaccatgttattcatactcttgctccaaaaccttcaaagacacttccagttactttccacaaacttacagtaacaatagctgagtgcttaccatttgccaaacattttcgtatgcattattttgtttaatctttacaacagctctatgagagtattaccccagttgtgaggaaattatggtctaaggagattaaaacttgattaaagcccggatgcggtggctcacactttgggaggccgaggtgggcggatcaccttaggtcaggagttcaagaccagcctggccaacatggtgaaaccccgcctctactaaaaatacagaaattagccaggcgtggtggcacgcacctgtaattctagctactcaggaggctgaggcaggagaatcgcttgaacctgggaggtggaggttgcagtgaaccgagatcacgccattgcactccagcctgggtgacagagcaagactgtctcaaaaaaaaaaaaaaggttaaggacacacaggcagatttgtactcgggtctgtcagactccaaagcccatcatgaagaattttggtggaaaagatgggctctggtttcaaatctccactctcaatttaccagtgaataaagtgtctatttatagcattattttaaggattaaatgagataacatgtgcctggcacatgtaagtcccctataagtgttcattgttattaatgatatgtacagataattgaaccactaccccctactttgtcccagtactaatcatccctctcttaggaagtcccaataagagttccatggatgtttacttccttgtttctaagatttggcccatgttgatttcatagcctggaatgcttcttctcccttctagctatctaaatcatttcctatatttgagctcagatcctacctacatgaagtctttgcagtgttctttccttcttttaaaaacttaatggctaaggcactttcttggttacttacaaatttggcctctgttcctagtttttcacatgtacttctttcgcaaattaaaatgtaagcttcagattaggtgggcatggtggtgtgcgcctgtagtcccagctactctggaggctgacacaggagaattgcttgaacctggcaggcagacattgcagtgagccgagatggtgctgctgcactccagcctgggtgcagagtgagactctgtctcaaaaaaaaaaaaaaaaggtaatcttcttgagggtaaaagttcatttagtgcgagtaagcattaggtataccatttcctgactggttggccattcattggatacatttggaggacagtatatcatagtagttaagatgtttggatcctggagctaaacaggctgggttaaaatcctggttctgccacttactagttttatgatcctggaaaagtcatttaagctccatggcctcagtttatccaatgaaatggggataacgatagtacctattactcataacagttgttgtaagaattaaatcaattaaagtgcctaaggtagtgcctggcacataataaagctatataagtgttatgtattattaaaaagatattctatgcacactgactatgaaccatgaaaaaaaaaaaggtattctaggagacatagagtgagattcatgatgtctgtcatcagaaagtttagatcttccttttccccatctaagagtcctcttcctggttatagtggagattaggaaattaacaaagtatggaatggtgagttagaaaatctatagggagaggctaactccttgctrtcttttgggggatcccaagggaataaccatgtggctctgaactatttcttacttctcagatgtggaccctccaaaggacacaattgtgaagaacattaccctgaactttgggccccaacacccagcagcgcatggtgtcctgcgactagtgatggaattgagtggggagatggtgcggaagtgtgatcctcacatcgggctcctgcaccgaggcactgagaagctcattgaatacaagacctatcttcaggtgtggggggtgaacaggagccttttggcgggatctggggttgctttagcctggggctttgccagtttgctgcccttaaaacgtgaggggaggaaggtgttgagaggagtaacccgttgagattactcttggttgggtggatggagggaagtggcaggggatgcttgagtcattaggatttggtttatttagcagcagtgctttgaagctggagctatactcagcttttctctggctgactttttggcaggcccctttgccattacttgagtgcctcagtttccctgctcttacgttagactagtgcgtcaaagccagtgtccctaggggcagggaaagagaaaagacattagctcgctaagtttaacagctgattcttgtatcttccagctgtctacgtttgttttcaaaacattcaatgagtcacagcaactcagagagggtttatgacagtttgccatttttaggagaactgtataacccaaatgatgaaggtcagatttgaaggagttggatctctaataggaatctgaagtttttttcttactgtcatgaagaaaggtcctgataacaggatggtaggattaggatttagatccagcccagtgtcggggtgaacagtgactagaatgtgattccccaagagagcctcggcgatgacagtttctggtcctggagtctatgggttaacccctgtagcattagcccccgtcacagtgacatcagaataagaacaggctgtcccagctagtagcgtcttagctccaccctcttcctggaagctgaagctggttcagcagacagctaggacttggctttttggcattctggaggaaggaccatttctacctgatgctctgtcttccttaaatacctcactctggccgggctcacgcctgtaatcccagcactttgggaggtcgaagcaggtggattacttgaggtcaggagtttgagaccagcctggccaacaaggtgaaaccccatctctactaaaaatacaaaaattagccagacgtggtggtgtgcgcctgtaggagaatcacttgaacctgggaggcagaggttgcagtagccaagatggtgctactggcactccagcgcctgggcaacagagcaagactgtgtctcaaaaaaaaaaaagattaaaaaaaaaaaccctcccagatactcttaagactgattgcctttctccttcagtatctgaagttttttgtttgttttgtttttttccctacggagtctcgctctgtcgcccaggctggagtgcagtggcgtgatcttggctcactgcaacctctgcctcccgagtttaagcaattctgtttcagcccccagagtagccaggattataggcacgcaccaccatgcctggctaatttttttttttttttttttttttttgagacggagtttcactcttgttgcccaggctggagtgcaatagtgtgatcttggctcactgcaaactccacctcccaggttcaagcgagtctcgttcctcagcctcccaaatagctgggattacaggtactcaccaccacgcccagctaatttctatatttttagtagagatggggtttcaccatgttggccaggctggtctcaaactcctgacctcatgagccaccctgacttggcctcccaaagtgctgggattacaggtgtgagccaccgcgcctgaccagtatgtcagttttttaaatttttattattttttgagatggagttttgctcttgttgcctaggctagaatgcagtggcatartcttgtctcactgcaacctctgcttcctgggttcaagtgattttcctgcctcagcctcccaagtagctgggattacaggcatgcaccaccacgccctgctaattttgtatttttagtagagaaggggtttctccatgttggtcaggctggtctcaaactcctgacctcaggtgatctacccgcctcggcctcccaaagtgttgggattacaggcgtgagccacgtgcccggccaaggactcttgacagtggtatcctggagctagctcatacgggcttgcaagagtgcagttgttaaattttcaggagttttgtgagccagttgttgaacatagccattgtcagaaattaatttatataagcttatgatttaatacattatattaaaagcaaaggtaagattaaatattcaaagctcatcacttcattattttaccacattttactatgctctgcctttgaggtatttgctttgaatgtgtctgtatggtggaaatactgtataatggtgtggtattcttcccaatgcygcattcagttacatgatattggtaacttaaaattggccattgtgggagtatttttaccatggaaattggcaaacatgacaaatcagagtcctccctcactttggagagccagtttttaaacatttactagaatactactggtttttgggatatttttacctgccttgttggggctcctgagactagaaaggcttatacagcaccaacttctggtgccgactgagagcaaggcttcaggcagccagactgtgggctcctgagcctgttagatgtgacccacattcctccctcttcccaggcccttccatactttgaccggctagactatgtgtccatgatgtgtaacgaacaggcctattctctagctgtggagaagttgctaaacatccggcctcctcctcgggcacagtggatccgaggtatgtccccccaactttttctgtggcccactgtgagcatagcatagtgccttttccaccacttccccgttgaacccaagcttaktgttcagaccccaggctctgcccagacctctctgtccgcctcagtgcttggctcctatatcctgtcttctccttgtcttcacagtgctgtttggagaaatcacacgtttgttgaaccacatcatggctgtgaccacacatgccctggaccttggggccatgacccctttcttctggctgtttgaagaaagggagaaggtaagagtgggaggaaaggataggaatagggaaggaagtgcaggaagtagagaaggtataaaggagacaggagattaaaagaagagagagaacatgggagaacatttagagggggaaggtatgtttaacttgggttatatttgtagaaactatatcatgaggggttggttgggcacaagaaggcagaaagtgggggagtaggccatcataggacctgggggcctgggactttgacactaattcccagcacgttctatgaagatgtttgagttctacgagcgagtgtctggagcccgaatgcatgctgcttatatccrgcmaggaggagtgcaccaggtgagcaggtccccggcttccccaaatgtccagcccaggcctattttccctgtggccactggagggcagtgctggatgatggaaactccaaacctgtatcgctgggggagggggtgctgagagggctctccttagtgaaggctatgccacattcantagcacttccgtttggcttctaggacctaccccttgggcttatggatgacatttatcagttttctaagaacttctctcttcggcttgatgagttggaggaggtaagctaggagtcaatgggaaaaatctctcccccacaagaagggctagagaaatacagagatatttgaagagtgtgaggaaragtattaacacaccagttttcttgatcaatagttgctgaccaacaataggatctggcgaaatcggacaattgacattggggttgtaacagcagaagaagcacttaactatggttttaggtgaggggaatacaacttctctccgtaggagtgggggtgggagtgggggagttccagcctaatatcttgtctttgaagacttgttggcatcctcctagtcataccctgaatgtgaaggatcaacaagggaggctaaggaagaaggagcctccttacttagtttgtggagagtggcccttattcccattatgctctccacagtggagtgatgcttcggggctcaggcatccagtgggacctgcggaagacccagccctatgatgtttacgaccaggttgagtttgatgttcctgttggttctcraggggactgctatgataggtaaggccccartcctttcttggctgatattccagctagtttcccctgcctcactcttctctttgccacttccttctttaccctacttctcagtgtctgtgggagctcttgtgtgtgttagacgaggttgctctcaaaacactttcacatatatggaatcttacttatttttttcttttttgagacggagttttgctcttgttgcccaggttggaatgcaatggtgcaatctcggctcactgcaacctccgcctcctgggttcaagtgattctcctgcctcagcctcctgagtagctgggattacaggcatgagccaccacgctcagctaatttatgtatttttagtagagacgggatttctccatgttggtcaggctggtctcaagctcctgacctcaggtgatctacccgcctcggcctccaaaattgttgggattataggcgtgagccaccacacccggcctatggcattctttttatctttacattatccttgtcttagatggagctagctttggctgcattttatagctgagaaagctgaggcataaaagttagggattagctgggattattcttcaggagtggtcgagactagaatcctcctgatccagtgttctttctagtagatcctaagcttcagattctcctcctgggccaggcacagtggctcatgtgtgtaatcccagcattttgggagtccaaggtgggtggatcacttgaggtcaggaattcaagaccagcctggccaacatggtgaaaccccatctctactaaaaatacaaaaaattagctgggtgtggtggtacatgcctgtaagtccagctacttgggaggctgaggaaggagagttgcttgaatctaggaggtgaaggatgcagtgagctgagatggagccactgcattccagcctgggcgacagagcgagactctgtctcaaaaaaacaaaaaacgaaaaccaaaaacaaattctcctcctgttttctcaccctgagtcagatttgttactgtgtattgttttttttatttttgtttgttttattttttgaacctggtagctactgctgttatttttgtttgtccatttgactctcacccatcctgtggtccaaaaagtgcttaaggaggtaattaaagaaataaatactacaggccatgttctgagaaaataaggagagggtttggggaagcacccaagagtagaagcaaacgattacagggggctggggttggtggctcatgcctataatcctagcactttgggagaccaaagcaggcagtcgcttgagctcaggagttggagatcagcctgggcagcaaagtgaaacctcgtctctacaaaaaatattcggatgtggtggtgcacgcctgtaatccaagctactttggagaccgagatgggaggatcacttgagccccagagttcgaggctgcagtgagctgtgaaaccctgtttcagaaaaaaaaaaaaagactacagggtttatatgggtggccaagccaagcagagatgctgtacttggagaaaagagtggggagagttgacctaacccttttgaggttggccaaagggcatccttcctagccccatacctgctcctctgactgttcttctcttgctctgtctcatcttcttgaggtacctgtgccgggtggaggagatgcgccagtccctgagaattatcgcacagtgtctaaacaagatgsctcctggggagatcaaggttgatgatgccaaagtgtctccacctaagcgagcagagatgaaggttggctgcagggagggggaaagtgtggggtgttggaaaggggccagtggctggggaggagtatccttggattaaatcctatcttttggttttcttttttttttgagacagagttttactcttattgcccagactggagtgcaatctcggctaactgcaacctccgcctcccaggttcaagcaattcttctgcctcagcctcccaagtagctgggattacaggcgtgtgccactacgcccagctaattttttgtattcagtagagacagggtttcaccatattggtcagggtggtctcgaactcctgacctcaggtgatccttggcctcccaaagtgctgggattacaaagcgtgagccaccacacccaacccagttttcttttaatagagaatttactgtrtagtaagagattcgggttttttttatttttttattttttttgagacggtgtcacgctctttcaccaggctggagtacagtggcatgatcttggctctctgcaaccactgtctcctgggttcaagcgattctcctgccttagtctcccgagtagctgggattacaggcacccaccaccacgcccagctaatttttgtatttttagtagagacggggtttcactctgttggccaggctggtcttgaacacctgacctcttgatctgcccacctcagcctcccaaagtgctggaattacaagcgtgagtcaccgcacccggccatataagagattcttaatctcccatagctctcctgttttattctgtatcctctctgcttactgactgacatgtggctttagtctccctgagggtagagattattttctgtgctgggggaggcctaggagacagagtttggatatggtttattgatgctccctgtttcctctcttcagacttccatggagtcactgattcatcactttaagttgtatactgagggctaccaagttcctccaggagccacatatactgccattgaggctcccaaggtaaggagaggaggggaaggaaaagaccatatgtagagtaggtagctaaagatagatgtttaacaaatagctcattcatcaatgagagagaaaacagaatgaatagaggttttgttggcagagaaaaatactcttcatgttaatacagacacccaaccttcttccttgaacagggagagtttggggtgtacctggtgtctgatggcagcagccgcccttatcgatgcaagatcaaggctcctggttttgcycatctggtaagaatcaatcccagtaactataactccaatgaattaaacctgaccttggttgaggtttttatgaactcttctttctcctcccaccttgcaagtcttaactaacattgttgccatctcaatctccctaggctggtttggacaagatgtctaagggacacatgttggcagatgtcgttgccatcataggtacgaggcctattgtgtagtagaggtatcctagacaaaggagttcgggacgcccactggggacagaaggagaacacttcctgttcaccataggccatggcatggactcgggtcctcaatcttttgagcacagtaatgggttctggatcttgggtaacaccactttttttgtttgttttgcctcacaacaggaagataagtaacatcacttttttcctccatcctctcacctaggtacccaagatattgtatttggagaagtagatcggtgagcaggggagcagcgtttgatcccccctgcctatcagctyyttctgtggagcctgttcctcactggaaattggcctctgtgtgtgtgtgtgtgtgtgtgtgtgtgtgkatgttcatgtacacttggctgtcaggctttctgtgcatgtactaaaaaaggagaaattataataaattagccgtcttgcggcccctaggcctaaacttctggtatcttagtgtctcagtatcttagtgtccttcactcggactgtaaacctaagaatgttcattaaccctccattcctgttagattcagtcaggtcttagcaatttttcctgctcgtctccacccccttctctgactcttgtcctttccacttctctattccccatttcctctttcgcctcagttccctccttgcccaaaccttctcagtgcccacataacttggtaaaccactcaaatcaagacctggggtaaagttgggagggaaagggctatagtggggtctgagggaatgttgacgggcagtttcacacagataaatctctgaaccagccgggcgcagtgcctcacgcctgtaatcccagcactttgggaggccgaggcggatggatcacctgagatcaggagttcaagaccagcctgatcaacatggagaaaccccatctctactaaaaatacaaaattagccgggcgtggtggtgcatgcctgtaatgccagctactcgggaggctgagagaatcgcttgaacctgggaggcggaggttgcggtgagccgagatggcgccattgcactccagcctgggcaacaaagcaagagtccgtctcaaaaaaaaaaaaaaaaaaaaaaatctgaaccaggtggagtggaaaatggcagatgtagacagcctttcctgagcgtgaragtctcctcattctgtgggttaggagttggtcattgaagggctgacgcttaagagcccagatctcccaactcccttagttggcccttccgggagccgcccrgtctcttgtgcaggaaggggaaggggccaaagcatgggggaaggcgtggcaggaagagggggactctgtggtcagggaactkctcgctgagcacagctgcacagtgctgtcagaacggccgatctccagcccaagatgattccagcagtggtcttgctcttactccttttggttgaacaagcaggtaagagggtttggtgagggatagcgtgagctggctccagggtggaagtccagagcttgggtctgagggccaagtcaaacacaggtgaaggaaggctgacagtgggtaggtgggcatagggagaccctgaggctagtcctctccagccccgacccagggcactagactcatagttccctcctttcttgttgccttcttacttcattccagacttttctccgtattattattattattttggagatggagtcttgctctgtcacccaggctggagtgcagtggcgcaatctctactcactgcaacctctgcctcctgggttcaagcgattctcctgcctcaggctcccgagtagctgggactacaggtgcccgccaccacgcccggctaagttaagtatttttggtagaaaccgggtttcgtcatgttgaccagggtagtcttgaactcctgactcaagtgatccacccacctcgacctcccaaagtgctgggattactggtgtgagccactgcacccagctattattattattaaaaaaagacagggtcttactatgttggccacatcggtcttgaactcctggcctcaagcaattctcccacctcggcctcccaaagtgctactgtgcctggctgacttttctcttttcagggttgatagaaagtggcaggggaagggtctggttgtatggcatgaagagctggtctggtgaaaagcctcatttctcatgatgagcatttcccatggggtgcctttggtcttgtctgctgggagctgatctctagctggtttaatatacaaagcacccttggtgcctataattccagctactcagaaggctgaggcaggagaatcacttgaacccaggaggtggaggttgcagtgagccaagatcgcaccactgcactctagcctgggggacagagtgagactccgtctcaaaaaaaaaaaaaagattttacatatatatctctatctatctatctatatacacacacacacacatacacacacacacacacacacacacacacacacacatatatatatatatagagagagagagagagagagagagataaccctttaggaaggtaggactctgttcttgtgcttgggagtaaggcaaggatatagccaagacaaacagacgggattgctgtttctatgggtcattgttaatgctccattctgtcagcagttgataatgagggtgggcagcatgagatccccagttccagagacctgagcgtcagctgagaaatagaggcagaaatgggaaggtctctgaagctctacagctccagccactatctaagaattctcactcctcgttcactctgtgttgtctgtgctggattggtgtgtgtgtgttggtggcagctgggtgttggggaggaggaggtcagtaaacttcagggaaactgtggaaattgaaagagaatgactggggaggaattccagcagcctagctgagaaggtgggagcaagtattaagttagccactggtctgctgccgtgggatgaggagggaggaggcccgctgaggcacaaaggaaagcatgggctttagaggcagaaaacctgcatttgagttccagctctgtcacttaactctgtggctctgagtgagttacttagcttttccgagccttggtttcgtcacccataaaatggcgatgatgatgtttccctcacagggtagttttaagatttgtgcaatatcgtgtgtgtgaaagagtgttgcagaataaaaagtacttgaccgatgtcagcaattgactgacgttagtcacatgttccctactggtcctctgatacggggtgagagcagtctctggagcccagacttgatttgattttttaaattgcacaaaacttcccctctcagagacccagagagtgagtaatagggcagagtaacaggagctggaatccatatagctgtggtcattcccccagccttgtgttcagggccaaaggtatctgtaaggtctgggaaaaacagacacactttttttttttttttttttttttacatatttaagtgtcttgtggtgggacagaaagcaacaaggctgaggctaggagatgaccaatgatagagtaattgccttctctcccttccccagctcacatccttcctgtccagccctcagccacaggtcacaggacttagtagagacacttctgtggtttcttcactgaaatttgccactacctctccctcccactacccatcttggctgaggttttggtttcagtccagtggactcagatgggtcccttgaggtggataaagtgctcaatggtgcctgaagaacccacagtgctaaaaagaaaaggttgggggctgagggggaaggcctcaattattagtccgtgtgagtcccatttcaatagaaccctcaagcttcctatcctagcctgaccctatggtgtgggaggagggaaaggtaagggcagtggaaggccagagagaaacagaatttcttcccttagacggctcccctccaggccctgtcctacctcccagagccccttcccttctctcctctgagtaccagatcctccctgatacccccgaccccatgggcatcctctatcccctcagcggccctgggagagcctcagctctgctatatcctggatgccatcctgtttctgtatggaattgtcctcaccctcctctactgtcgactgaaggtagcgctgggcagggtggggtaagggctggaaggggaagtgggaggagggcagcagcaaggattcgaagagaaggaataaaaggggatcctccacaaagtttggagggaagggggatgggccattaacttaccctttactgataacctttcccccattccagatccaagtgcgaaaggcagctataaccagctatgaggtatggaccctcctacacctggtgtggacaacttttcagaccctcagccctcctggggctctagcctgggtttccgggcctctgggagggcctgcctctcaggtgctgatctgcatacacctcagaggcctccctcccaccttacctagccaagccacaagtaaaatattcagcaggtgacagggaagaatcaagcatagagtgataaagaatatgtgagagacttggatgtagtatgtcgggtgtatatgtgtgcttgtagccatgtgggcaaacaggtatccatgtcccagagtgtccatgtgagtgccctctagcccaaggtggctggctgcccaccccccatgcctccctgggtggggcagatgctgaggggccctggagaaagtgtgggtctttaatgttttgcttcttttgtctctgcagaaatcagatggtgtttacacggtaagtgtgcctacctcccccacccaggaagtcagcagaagagggtgggattttgagcgatctttggaaggccggtggggggaggggggtcctgtggaggtgggaggggcctctgatggactccagctcctgatcgccctttgactcccatctccagggcctgagcaccaggaaccaggagacttacgagactctgaagcatgagaaaccaccacagtagctttagaatagatgcggtcatattcttctttggcttctggttcttccagccctcatggttggcatcacatatgcctgcatgccattaacaccagctggccctacccctataatgatcctgtgtcctaaattaatatayaccagtggttcctcctccctgttaaagactaatgctcagatgctgtttacggatatttatattctagtctcactctcttgtcccacccttcttctcttccccattcccaactccagctaaaatatgggaagggagaacccccaataaaactgccatggactggactctattcattcattcattcatttatcatagatttattcagtctctgctaagcactagatacagcttttcagttccagaactcacagtctaatggacttcagagctattttgctcgactgagggataaatgctgactatggctgggggagggataaaaacctttgacctgtaggtgctctgaggatggagctggagcagggactagtgtgttgggagtctaggcatatttggaaacataagaaatgacttctgtatcagcatggccttctgtgttcgacaattgaaccaaggttgggttgtaggggagcctgggtgtccccagatggccaccaatccagacagcatcaatccagtacatgcatatgggaattagcatagctgaaaagccaaatatgcagaacggatggtgtaactagggctgagtgaagctcctaatggaaggttttatagcaacagtgaattttcagggcatctggggcaagtgggaccttagagggccagatgggtcagtggtaggtaaggcaaagggaaataagttgggtccaaatgggggggtcatctccttcaagtgcatgggtggtggtcaaggccctgtcaatgcctgtcctgttttcagagctacgaggaatatttgcctgaaagaatttaaacctcaggagatgctgccagtcctacttgtgacccagtcttttcagaatgggtctagagactccaagcttacccctggcataacccccaacctccacagtgctgcacaacacttcacactgcatagtgacttacacttttcaaagtattttccagctcattgtaccatttgatctgctaattaaccctgtgaggaaattcaggctctttgaagttaattaacctgtccaaggtcaccttgcaaggaaccgactgagatcactttcgtctctgcacattttgccacatgagaagaagcagatattgggaaagagaaggggtagtgagtaatcatgaatggcgagggtcttgaaggccagatgaagcaggttgatcaatatctggaaggaattggagccatctccggtgtctggcgggggaaaggtgatttcagatgagataagagaaatgagccagggtaggaaagtaacttttttttttttttttttttttgagatggagtctcy

SEQ ID NO: 93936 - DNA, 15898 bp, Homo sapiens
ctaggctggagtgcagcagcgcaatctcggctacttgggaggctgaggcaggaaggagaactgcttgaacctgggaggtggaggctgcagtgagccaaggtggcacaactgcactccagtctgggcgacagagtgagactctgtcgcaaaaaaaaaaaccaaaaaaaaaaaaaacgtaaactgccaaaccagtatgatttcttttcttatggaaaacatttattttttatttttacttaaaaattttttaggctgggcacagtggctcaggcctgtaatcccagcactttgggaggccgaggcgagtggatcacctgaggtcgggagttcaagaccagcctgaccaacatgaagaaaccctgtctctactaaacatacaaaattagctgggcatcgtggcgcatgcctgtaatcccagctactcaggaaggctgaggcaggagaatcacttgaaccccggaggcagagtttgccgtgagccgagatcacgccattgcattccagcctgggcaacaagagcaaaactccgtctcaaaaagaaaaaaaaaatttttttttagaggccaggctcagtggttcatgcctgtaatcccagcactttgggaggccaacacaggaggatcacctgaggtcgggagttggagaccagcctggctaacatggtaaaaccccgcctctactaaaaatacaaaaaattagcctggcgtggtggcatgcacctgtagttccagctacttgggaggctgagacacgagaattgcttgaacccaggaggtggaggttgcagtgacccaagatgcaccactgcactgcagcctgggagacacagtgactctgtctgaaaaaaaaaaaaaaaaaaattgttttagggacagtcttgctctgatgcccagagctggagtgcattggtgtgatcatagctcaactgcagcctcaaatttctgggctcaagccatcttcccatcccagcctccctgagtagctgagactgcaggtatgcactaccacacctggctaattttttgtagagatggagtcttgctctgttgcccaggttggtttcaaacttctggtctcaagcagtcttcccacctgggtctcccaaagtgctggcaaaacattttctgttttagttccatactgaagtccacaagtgttcaattatttgtttgtatttttctcttagttttatggggatattaccacaaaatattgagtttactcaatttcctccctaatatagaaaaattaaatgattccctgcctggtgtaaaaaaaaaaaaacaaaaaaaagatgatttcttcagccccacgaacagctgccagtcattcttgggcattttttctctgcattagcttcggggtgtcaagatagaccgttgattgagcctactgacaggagtatttgcatacttgtttggagatttatcaaaaataggatatattttgacacagacttcttgctccccccgctccccttttggcaacatccacttttttttttttgagacagagtcttgctctgtcaccctagctggagtgtagtgatgccatcttggttcactgccacgtccgcctcctgggttcaagcaatcctcttgccttagtctcccgggacattgctgggactacagacgtgggccaccacacccggctaatttttgcatttttagtaaagacggggttttgccacattggccaagctggtctcaaactcctggcctcaagtgatctgcccgccttggcctcccaaagtgctaggattacaggaatgagccactgcacctggcccatccacttgtttttgctttatttcaatacttattactattctgattatcagtaaaatttctgctaggaacacaagtggatttaatttatctcccctgacttgtttccacgggacctcccattcccacttgattttgaggattgaagataaactgggagagaattatctagcagcaaaatactgctaatgcgcttaattattttgttttccaacacatattttatgtcaaattgtgttcaaatctaaatacaacacagtcttcttaaagtcagtctccaacttccaaattccttaatttgccccattaataatcataactcctattagacccacattttatttctctcatttttttttttttttagacggagtttcgttcctgttgcccaggctagagtgcaatggcacaatctcggctcactgcaacctctgcctcctgggttcaagcgattctcctgcctcagcctctccagtatctgggattacagggccgtaccaccacgccagctaatttttgtatcttagtacagacagggtttcaccatcttggccaggctattctcaaactcctgacctcaagtgatccgcccgcttcagcctcccaaggtgctgggattacaggcatgagccaccgagcccggcctatctctctaaattttaaaagcgtcctttcctgccctagatttcaaaaagccatcagtaccgtcatgtgaagttcctccgttacactcattgtcaggtacctgctcagcatatattacacttcttttaggagaattcctgatttcactgcctctccccctgcagctatgggttctagggaatgctaactccaccctgatcccaggggcaatggtggcaatctccatttggtttaagccaacttcaacattcgatgacaggagaaaatatgtgacttggacctttcttagaaatctgaatcttctccctcctactcaacataagcaaaaaaggatgaggccccaattacactgacagccaccttatgatgttattaatggcagagaagacagaaagaagaggttcctggtgtcatcatttagccattggatcaatcaaatgttaagccagacccactcttgattttccatccaatacatttacttttcttttttgtgtttaatttaattaaaaagttaaaaaaaaattaaggaacagggacatgaaccctggaccctcagattaaaagtctgatgctctatcaactgagctatctgggttgtttacttttttttttacgttttatattttaaagcagtttcaggttcatagcaaaattgagcagaaggtagtgattacccatatactccctgtgccccccaaaacttgcatagttcccttatctccactatcaacatcccccaccagaatggtacatttgttacaattgattaaccttcactgacataccattatcaccccaaatctctagtttgctttagggttcgtttgttctacatctacagttttggacaaatgtataatgacatgtatccaccattacagtatcatacagaacagcttcactgccctaaaaattgttccaactattcatccctccctccccacaatccctggcaactactgatctttttactatctccaatacttttgctttctctcttccttcccttttttcttttctttttccctttcctttttttgaaagtttcgctctgtcaccgatgctgtagtgcagtggtatgatctcagcttactgcaacctctgcctgccaggttcaagcaattctcctgcctcagcctcccaggtagctgagactacaggtgcacatcaccatgccccactaatttttgtattgttagtggaggcgggtttcaccatgttggacaggctcgtctagatctcccaacctcaagcgatccgcccaactcggcctcccacagcactgagattacaagtgtgtgcccctgtgcctagcctaccttatatttcatcaaaaagctttttttaagtaaactgacatgtatggccaggcacggcaggtagctcccacctataatcctggtgtttccagactggtcttggtctcactgacttcaacaacgaagccacagaccctcgcggagatgttacagttcttaaaggcagcgtgtctggagattgtaccttctgatgttcccatgtgctcagagtttgttccttctggtgggttcgtggtcttgctggctcagaagtgaagctgcaaacctttgcggtgagtgttacagctcttaaggcggcatgtctggagttgttcgttcctcctggtgagttcgtggtctggtaggcttcagaagtgaagctgcggaccttcgcaatgagtgttacagctcacaacagcagtgcgggcccaaaaactgagctacctttattacaaaactaaatagaacaaaccttcccgcaacgtagaaaagaaccccaacaagttgccactgctagctctggcagcctgcttttattcccttatctggccccacccacatcctgctgattggcccattttacagagagccgattggtccgttttgacagggtgctgattggttcgtttacaatccctgagctagacacaaaagttctccacctccccactagattagctagatacagagtgccgattggtgtattcacaaaccctgagctagacacagggtgctgattggtgtgtttacaatcccttagctagacataaagattctccaagtccccaccagactcaggagtccagctggcttcacccagtggatgccgcacggggttcgcaggtggagctgcctgccagtcccgcgccgtgcgcccgcacttctcagcccttgggcggtcgatgggactgggcgttagtggagcagggagcggagctcgttgaggaggctcggaccgcgcagaagctcacggcgggggcgggggctcaggcatggcgggctgcaggtcccgagccctgcgccgcggggaggcagctaaggcccgctgagaaatcgagcacagcagctgctgccccaggtgctaagcccctcactgcccggggcttgcgggccggccggccgctccaagtgcggggccgccgagcccacgcccacccgggactcgcgctggcccgcaagccccgcgggcagccccggttcccgcccgcgcctctccctccacacctcccagtaagctgagggagccgactccggccttggccagcccagaaaggggctcccacagtgcagcggcgggctgaagggctcctcaagcgcggccagagtgggcgccaaggccgaggaggcgccgacagcgagcgagggcagccagcatgctgtcacgtatcactagcactttgggactacagaggcaggaggatagtttgtgctcaggagttcgagaccagcctgggaaacagggtgacacctcctctctaaaaataaacatttaaaaattaacgtggcatggtggtgcgctgtctgtagtcacagctactccgaaggctgagacaggaggatcacttgagcctgggaggtggaggctgcagtgacctgtgatcgagccaccgccttgcagcctggatgacagagagagaccctgtctcaaatacaacaaaaaagcaggccgggcgcagcggctcacgcctgtaatccctagcactttgggaggccaaggcgggaagatcacttgaagtcaggagttcaagaccagcctggccaacatggtgtaactccctctttactaaaaatacaaaaattagcggcatggtggcgcgcgcctgtaatcccaggtactcgggaggctgaggcaggagaatcgcttgaacccaggaggcggagattgcagtgagccgaagcgccactgcactccagcctgggcgacagaggagactctgtttcaaaaaaaaaaaaagttaaaaacaaaaccttccatggagcccatgaaaggctggaatttggcttgatctcattggcttttggtttcaccacaaattgatcatccaacaactttcattccaacaaccgagggtggtgtgaggcagagaggctttctacggggtgggttgggcgccacaccttgcgcgccccggggcccaaggagacgaccctgaagaggagcctggctacttttgcctcagacgagtccggagcgccgggttaaccggtctgaagtcccaggggctttctgggactgctcagccaccggcagcttccggcaccaggggacgccggacgccgtccggacattcggcgcgcttgccacgatcttggacgggtctcgggcctcgacctttgaattccccgctccggctccaagatgtcagcaacgctgatcctggagcccccaggccgctgctgctggaacgagccggtgcgcattgccgtgcgcggcctggccccggagcagcgggttacgctgcgcgcgtccctgcgcgacgagaagggcgcgctcttccgggcccacgcgcgctactgcgccgacgccygcggcgagctggacctggagcgcgcacccgcgctgggcggcagcttcgcgggactcgagcccatggggctgctctgggccctggaacccgagaagcctttttggcgcttcctgaagcgggacgtacagattccttttgtcgtggagttggaggtgctggacggccacgaccccgagcctggacggctgctgtgccaggcgcagcacgagcgccacttcctcccgccaggggtgcggcgccagtcggtgcgagcgggccgggtgcgcgccacgctcttcctgccgccaggtgagccaggctgctggcgggtggtgtgagcgtcagtggcctgagtctccgtttgtttccagtgctgatttagcactggtttggttttggagcaagatcagagaagctaacattgactatgtcagtggccactctaccaaaatagagggtttggtaccgggcgtggtgactaacgcctgtaatcccagcactttgggaggccgagatgggcggatcacttgagatcaggagtttgagaccagmctggccagcatggtgaaaccctgactctaccgaaaatacaaaaattagtccagcctggtggcacacgcctgtagtcccagccactcaggaggctgaggcacgagaatcgcttgaacctgggagatggaggttgcagtgagccgagatcgcaccactgcactccagcctgggtgacagagcgagactccgtctcaaaaaaagaaaaaagaaaaaaaaggattttttgttaggctgtgtactacggtttttacttgcattctatcagttagtctctataatatcccaatgaagttggtattgttattctgcagatgaaaaaacaggttcaggtcgtcaggtacattatccactttgctattaatcactaccctacagatttctacaggcatcagcctgacttgtctaaggcagaatgatgacagtgaatgaagctattaccatgtcgtcttctctagtgttctaggcacactgtctcttctccacttcttcatgtgctgctttatcacaggtcacacttcagactccactgcctttctcacctaaaaccatctctgggtatttctttttctttcctccctttctacatagacatctgaaatatcagtacactaaaaaccagagggctgatgcaacagaacataaagttttgtttcaatcttttttcttttctttctttctttttttttttttttttttttgagacagtgtctgtctctgttgcccacgctggagtgcagtggtgtggtcacacctcactgcagcctygacctctggggctcaagtgatcctccctccattgcctcccaagtagctaggactacaggcatacaccaccacactgactaattaaaaaaaaaaaaagattgtagagatggggtctcactacattgtccaggctggtcttgaactcctggcctcaagcaatcctcctgccttggcctcctaaagtgctgagattacaagcatgaaccacagtgtccagccaggaaagcaaattctttaaattgtataatggcttacatttataatattttgttctctaggacctggacccttcccagggatcattgacatctttggtattggagggggcctcttggaatatcgagccagcctccttgctggccatggctttgccacgttggmtctagcttattataactttgaagatctccccaataacatggacaacatatccctggagtacttygaagaagccgtatgctacatgcttcaacatccccaggttctcctcatgtcctttatttaatcagtctctctagaaatatttccatagagagtgtaacctttaccacgtgcagaaatgctgctctgttcctctttcacaaagatgtcttctggagacttccttggcttaaggtgctatttccactttttctgtcagatgaatttgtgatatagaattaattgtaaaatccacatgagattttatttagtaatattaaatattatctgtatattgcaaattgaatttctaatctactgtctttgcatgcttgtttttaaattttaatttcctggtgtcagagtatgttctcagattttggtcagaacttgtccacccctttcagaagccaagaacaaacttacttactctgaagtcttgctttgtaatcatttgccaatacatatggcaaatgatctgatgaatgattcacatcttgaaacaacctggttccacactattggatgcattgccacatgaagacttcagtcagacctacctgaatgtggccctgaacttgatgggatctgtggctcagcggctcagcattctctagtggataattctctgaaatgcttataaccagtttccaagtttttcagtgattttaagatgtgtttgccatgtgttcagccagatattctgcacatgggaagaaactcccctgtcagctgaggttgattttcttgtggatgattcccagattaaagctagcagcatctctgtttgcattttagaaaaatgtttttgcattggataagttatttatttatttatttatttatttatttatttatttatcttttgagacggagtctcgctttgtcacccaagctggagygcagtggcgcaatctcggctcactgcaacctccgcctcctgggctcaagcaattctcctgcctcagcctcccaggtaactgggattagaggcrtgcgccaccacactcggctaatttttttttgtatttttaatagagacagggttctgccatgttggccaggctggtctcaaactcctgacctcaagtgatccgcccgcctccgcctcgcagagtgttgggattacaggcatgagccaccgcacccaatctggrtaagttattgactcaactctcctctcttcttttcttccaggtaaaaggcccaggcattgggcttttgggcatttctctaggagctgatatttgtctctcaatggcctcattcttgaagaatgtctcagccacagtttccatcaatggatctgggatcagtgggaacacagccatcaactataagcacagtagcattccaccattgggctatgacctgaggagaatcaaggtagctttctcaggcctcgtggacatygtggatataaggaatgctctcgtaggagggtacaagaaccccagcatgattccaatagagaaggcccaggggcccatcctgctcattgttggtcaggatgaccataactggagaagtgagttgtatgcccaaacagtytctgaacggttacaggcccatggaaaggaaaaaccccagatcatctgttaccctgggactgggcattacatcgagcctccttacttccccctgtgcccagcttcccttcacagattactgaacaaacatgttatatggggtggggagcccagggctcattctaaggcccaggaagatgcctggaagcaaattctagccttcttctgcaaacacctgggaggtacccagaaaacagctgtccctaaattgtaatgcatttgtctgttgttgacatgagagattcaagatcagattctagtgttcartaaccctatgtgaatcagatgtctcctggataacattaaagccatgtctttgtcattaatggtgtattttacgtaactttgttgaataagctttgtcgttagttttactaatgtaacttgcttgttgtagaagattaagaggcatatgacacatataagtgaaaaacattcccaccagttaacatttgtgtttccttctagatttttttagttaatgttttgagtcacaggtgagctttaaagctggtgactttttccatcactatgaaagaatggtcacttaatgtttgctgttcaaccatcagtagcagggtagaattttctttggccagaaacatacagaggggtgttaatatgaggaaaggcagctgaccttttcattataaacgtgagagaagactcttttgacaggaggagatgagacctgtctctagaatagttaagtctgtactctcttccaagggtgaattactacgatctattttccctctcacttcctctctaagagcagaccctggggccgagtacagtggctcacacctgtaatcccagtactttgggaagtcaaggggggcatattgcttgagctcaggatttcatgaccagcttaggcaacatggcaaaacccaatccctacaaaaattagccaaacatggtacacacctgtagtcccagctactcgagactcagatgggacgattgcttgagcccgggaggtcaagattggtgcagtgagccgtgattgcaccactgcactccagcccaggtaacacagcgagaccccgtttcaaaagaaaaaaaaagaatagaacttggaaaatcgtactgtggtaaccctagaggaatcactcctttgtctccttgacattgacactacatagcatttattattattattattattattttttgagacagagtcactctgttgcccaggctggagtgcagtggcatgatctcagctcactgcaacctctgcctcctgggttcaagcgattctcctgcctcagcctcccgagtagctgggattacaggcatgtgccaccatgcccggctaatttttgtatttttagtagagacagggtttcactatgttggccaggctggtcttgaactcctgatgtcaagtgatccacctgcctcggtctcccaaattgctgggattacaggcatgagccaccgcgcccagcttacatagcatttattaatataagcgtatttgaaaagataatggctgagaaatttccaaaactgatgtcaaagacatcaagccacatattcaagaagaattgtaaatgccaggcagaataaatacaaagaaaaactacgcttatcacagtaaaactgtttatggtaattttattttatttatttatttatttatttatttatttttttgagatagagtctggctctgtcacccaggctggagtgcaatggcgcaatctcagctcactgcaagctccgcctcccaggttcatgccattctccctgcctcagcctcccaagtagctgggactacaggtgcccgccaccacgcctggctaattttttgtatttttagtagagacagggtttcgccatgttagccaggatggtctcgatctcctgacctcgtgatccacccgcctcggcctcccaaagtgctgggattacaggcgtgagccaccatgcccggccattatttatttatttatttgagacagagtcttgctgtgttggccaggctggggtgcagtggcacgatctcagctcactgcaacctctgtctcccgggttcaagtgatcctcctgcctcagcctcccaagtagctcagactataggcatgtgccagcacgcccagctaatttttgtatttctttttctttttttttcttttttcttttctttttttttttttttttttgagaaggagtcttgctctgtagcccaggctggagtgcaatagcacaatctcggctcaccacaacctctgcctcccaggttcaagcaattcttctgcctcagcctctcgagtagctgggactacaggtacctgccaccatgcctggctaatttttgtatttttagtagagacagggttttaccatattggccaggctggtctcaaatccctgaccttgtgatccatctgcctcggcttcccaaagtgctgggattacaggcattagccaccgcgcctggccttttatttcttttgtagagatggggtttcgccatattggccaggctggtctttaactcctgacctcaagtgatccacctgcctcagcctcccaaagtactgggattacaggtgtgagccactgcaccaggcttgtttatggtaattttaaaacatagctgtaaattcattggcatttccctcatcaaaagatgggagacctgccgggtgcagtggctcatgcctgtaatcccagcactttgggaggccgaggtgggcggatcatgaggtcaggagatcaagaccatcctggttaacatggtgaaaccccgtctctactaaaaatacaaaaaaaaaaaaaaaaaaaaaaacatagccgggtgtggtggcaggcgcctgtagtcccagctacttgggaggccgaggcaggagaatggtgtgaacccgggaggcagaacttgcagtgagccgagatcatgccactgcactccagcctgggcgacagagcaagactccgtctcaaaaaaaaaaaaaaaagagagagatgggagacctatgtccccttccttcaaatctggatgaacttgtgactgtttcagtcactagagtagagcggcagtgactttgcaggcgaggtcatagaacgccgtgaggattctaccgtgtttgccaggaacacctgcctttggagcttgagccactatgtaagaagtttgggacaggcgctgtggctcatgcctgtaatcccagcactttgagaggctgaggcaggcagatcacctgaggtctagagtttgagaccagcctgatcaacatggtgaaaccccatctctactaaaaatacaaaaattaggccaggcattgtggcttacacctgtaatcccagcacttcgagaggccaaagcaggcggatcacctgaggtcgggagttcgagaccagcctaaccaacatggtgaaaccccatctctactaaaaatacaaaaaagtagccaggtgtggtgttgggtgcctgtaatctcagctactcaggaggctgaggcaggagaatctcccaaacctgagaggcagaggttgcaatgagtcaagatcacaccactgcactccagcctgggcaacacagcgagactgtctcaaaaaaaaaacaaaaagaagtttgactaccttgaggatgtgatgctgtgatgctgtgatgaagcttaaaatacatgtataagccaaccacaggcactcctgtgacagtcccaactgtggtcagcgtctcagttatctcagcccaagtgccagacatgtgagtgaaaaacacctccagatcatcctagcccccagccatttaaatctcggtggagacttcacataacctccactgagcagtgatgtccctctcaagccctgtccaaactgcagatttgtgagcaaaatagattgtttttgttttatgtgactatgttttcaggtgtgtttcagttatctattgttgtgtagcaaaccaccctaaaacagcagcttaaaacactaaccatgtatttttctcaagagtctgcaaatgggacaggactgggtaggaatggatcaccactgttcgaagtgacacgggctgcggtaatttgactgaggggttgaaactcagcccaagtaattagcaagaaggcccagatggagagaaattgagaaccccctaaatcatatcccttcctgagttcccaattgacagccagcaccaacctccctgccataaaagtagagtctccaagagagcctagcaagcctagcaagcaattctgcatgacctttgttcagctttgtcttggaagctattatacatactatcactctcccatgctctattgaacaaggcagtcaaaggctaaccaaagttcaaggagagcatagtctgcctcttgaaaggagagtggcaaggttctggagaagagcatgtggaatgggaaataattgtaaccatctttggcaaatacagtctgccttctggccatacattcctccacatgtaaaataacacccattcctcttctataccctctcccccaaaaatctcatttcattatagcatcgcactcaggctgaaggtccaatatttcatcatctatatcagatccaggtatagatgaggctcagaacagtcccttgggtatagctccttgaatatccttcttctcaatctgaacggctttgaaacaaacaagttagctatcctcacagatgcatgtccataatacaatggtgggagaagtataagataactcctatagacagtcctgttcaaaaatggggaaaatgtggcacacagctgtcactagcctgtagcaactctgaaacacaccggagaacacgctgccaattccttcattagtgttcaatttactctctgtgagttgttctctgtagcttttggttctacctcctgagttgaaacctttattttccataagaaaatgagttagcaattaaatttaacctgcctcctagatggaaaaggggagttcaaagttctcttttaattttgtattctctgccttttaagttccagctcatagtggaactggaattattcttcagccagaacaattttctttttttttccaagacggagttttgctcttgtttcccaggctggagtgcaatggcgtgatctcagctcactacaacttctgcctcttgggttcaagcaattctcctgcctcagcctcccaagtagctgggattacaggcacccaccaccacacccggctaatttgttatgtttagtagagacagggtttcaccatgtcggccaatctggtctcaaactcctgacctcaggtgatccacctgcctaggcctcctaaaatgctgggattacaggcatgagccaccacgcccagccagccagaacaattttcttaaaaactttgtggggttttctaaaaatctcagtgggtttcactccactagacaaaatacacctctagatatctgtttaagaacttctcggccaggcgtgctggctcacgcctgtagtcccagcactttgagaggccaaggcgggcggatcacctgagaggtcaggagttcgagaccagcccggccaacatggcgaaaccccatctctactaaaaatacaaaaattagccaggtgtggtggtgcgtgcctgtaatcccagctactcaggaggctgaggcaggagaattgcttgaacccaggagatggaaattgcagtaagccgagattgtaccactgcactccagcctggatgacagagtgagactctgtctccaaaaaaaagaaaatgacaattaaatgaaatatttttgtaagtgtttaaatgacccatcaggtaaatgtacctgaagctttgactgtcttcccaaaaatatggatttgacaaaccaaacattggttataaactactttagcaggtcagtgtggtggctcatgcctgtaatcccagcactttgggaggctgaggcggacagatcacttgaggtcaggagttcgagaccagcttggccaacgtggtgaaaccctatctctactaaaaatacaaaaattagctgggcatggtggcgcacgcctgtaatccccacaacttgggaggctaaaacaggagaattgctggaacctgggaggcggagattgcagtgagctgagatcgcgccactgcattccagcctgggcaacagagtgagactctgtctcaaaaaagaactactttagcaatttataagtcagcaaaccaatatgtatttaaattggatcattttgtcttttccatgatgagtcatagaaaccataacctttaataacaaaacctttagggactcaggaaagacaaggcagccatcctggttctccatgagtccatgcttaacattggacttatgtcctcttgaataccagt

SEQ ID NO: 93937 - DNA, 35242 bp, Homo sapiens
ctgtgtcagcctcccgagtagcaaggattacaaaccaccaccaccaccacccccgccccccaccaccaccactacccccaactaatttttgtatttttagtagagatcgggtttcaccatgttgcacaggatggtctcgaactcctgatcttaaatgatccgcctgccctccgcctcccaaagcgctgggattacaggcgtaagccaccgcgcccagcccagctcttcttaaaatgaagtggcaattccaggtttggggtaacgtaaaagttgaaacagcagaaactcagggacctgaggcagttaatgacaagaccaggaagaagaagcaccaccatcaccccgcagacgctgcagtcagggctggagttgagacagagagaagcagctggccagagacaggctgacaggtgatagggcagggttggcatcctcaaaatccaggagtcagataaaggagagtggaaggaaaaggtcagctgattataagatcttgagctcaaaatactgagattaggatgggaataagcctgtgggtaaaatggtccactaacaaatgacacagaagacacctatggttaaatgagcttattctactgaatgtgaagctgaatgttagttgcttttgtggtctgctatcattttcaactttcctgggccaggcccccttttccaagggtacaacctggttcccatcttagaactcaatttccattcaggggtactgtttttaagcatacttaaacgcacacctgagtgtgcttcaccatcccacacactccacagcccacccactttctggaactattcagccctcagtagccttgtagcaaaccaagaatggcaaatgtttccaccactcccttttcctccaatacaccagccccaccttaaggatcctcgctttgaggggaggatcaaacataaggaatgatagcccgaaacaccaacagccaaccgtatttcagtgtttcacccagagccagcccggtttactttcaaatatatgcaactgcatttaaaactgtccaactctgcttaaggagtcttcagtcatagccataaaatgtaacagtgtgtgcacagtcagtgggttcttggtctcaccgacttcaagaatgaagccacggaccctcgcagtgagtattacagttcttaaagatggcgtgtccagaatttgttccttctggtatttggacatgttcagagtttcctccttgtggtggattcgtactctagttagcttcaggagtgaagctacacaccttctcggtgagtgttacaactcttacagcagcgcacctggagttattcatccctccccgtggcctcaggggcctcactgacctcagcagtgaagctgcagacctttgcggtgttacaagctctctaaggcagtgcagctggagttgtccgttccttctagcagattcacagtctcattggcttgatgagtaaagctgcagactttcacggggagtgttgcagttcataagcgcagtatagacccaaacggctagcaacaacaggatttagttgaaagaacaaaccaccggcagccccctcaccacagaaacagactccaacaagttacgtgctagctcgctcagcctgcttttattcccttctctggccctactcacatcctgctgattggtccattttacagagagctgattggtccgttttgacagggtgctaattggtgcatgtacaaaccttgagctagacacagagtgctgattggtgcatttacaatcctttagctagacacaaaagttctccaagtccccactagattagctagacacagagcactgattggtgtgtttacaaactttgagctagacacaagagtgctgattgatgtgcatttacaaacctttagctagacataaaagttctccaagtccccacccgactcagtagcccaggtggcttcccctagtggatcctgcgccctggccggaattgcccaccagtcccgtgcggcgcgccgccactgctcagcccttgggcggtggatgggaccgggctccctggagcagggagcggcgcccatcggggaggctcgggccgcccaggagcccacggagagtagggggcgggggctcgggcatggcaagctgcaggtcccgagccctgccctgcgggcaggcagctgaggcccggcgagaattcgagcgcagcgtgggcgggccggcagtgctaggagacccagcgcaccctccgcagctgtgggcccaggtgctaagctcctcactgcccagggctggcggtgccagtcggctgctccgagtgagaaatgacagcgtgctggcagtcctcacagccctcgctcgctctcggcgcctcctctgcctgggctcccactttggcggcacttgaggagctcttcagcccaccgctgcactgtgggagctcctttctgggctggccaaggctggagccggctccctcagcttgccgggtggtgtggagggagagcgggaatcggggctgcgcatggcgcttgcgggccagctggagttccgggtgggcgtgggctgggcgggccccgcactccaagcagacaggccgggcaatgaggggcttagcacccaggccagcggctgcggagggtgtactgggtcccccagcagtgccagcccaccggcgctgcactcgatttctcgccgggcattagctgccttcctgcgggcagagctcgggacctgcagcccgccatgcctgagcctcccacagcctccgtgggctcctgtgcggcccgagtctccccgatgagcgccgcctcctgctccagggcgcccagtcccatcgaccacccaaaagctgaggagtgcgggtgcacggcggcggactggcaggcagctccatctgcagccccggtgcgggatccgctgggtgaagccagctgggcttctgagtctggtggggacgtggagaacctttacgtctagctcagggattgtaaatacaccaatcagcaccctgtgtctagctcggggtttgtgagtgcaccaatcgacactctgtatctagctactctggtggggccttgcagaacctttgtgtagatattctgtatctaactaatctggtggggacgtggggaacctttgtgtctagctcagggattgtaaacgcaccaatcagcgccctgtcaaaacagaccactgggctctaccaatcagcaggatgtgagtggggccggataagagaataaaagcaggctgcccgagccaacagtggtaacccgctggggtacccttccacactggggaaaatttggtcttttgctctttgccgtaaatattgttactgctcactctttgggtccgcactgcttttacgagctgtaacactgtaacactcaccatgaaggtctgcagcttcacttgtgaagccagcgagaccatgagcccaccgggaggaatgaacaactccagactcgctaccttaagagctgtaacactcactgaaggtctgtagcttcactcctgagccagtgagaccacgaacccagaaggaaaaaactccgaacaccggaaggaacaaactccaggcgtgccaccttaagagctgtaacactcactgcgagggtccgtggcttcattcttgaagtcagtgagacgaaaaacccaccaattcaggccatacgagtgcggagcccacccagctcgcgcccacccagaactcgcgctggccctcaagggctgcgcgcagcctcggttcccgcccgcgcctccctctctctccacactgccccgcaagcagagggagccagctctggtctctgccagcacacagaggggctcccacagtgcagcggcgggccgaagggctcccgaagcgtggctagagtggacgccaaggccgaggaggcactgagagcgagtgagggctgctagcacgttgtcacctgtcgataggtgcacctaaatacgggttcattatttgaccaaaggcgggattctacgtctagacatgcatacccacctacattctcttgtacacagtaccatggccgtttctaatatgaaatggaaacctacatatcaaaacaatagctataaatacgtggtgggtgtggtctgttccttaaccctactaaggccttcatctgaggaagcagatctatattaaaagagagcagtatttcccaagtagcccttgagttcacacaaaaattttgttttctaatttggcctttgatttgattttgttttctaatttggcctgagataatcagccaatatggtcaccatattgaacagcacagatctaaaaggatttcccgagtatggaaaatctctgtgggtgtctaggatggttaattttgtgcatcagcttgactgggccatggtgcccagttatttggacaaacattattctggatgtttctgtgaaagtgtttttggatgagatttgcattaaattgggaaacgttgagtaaagcagactgccatccataatatggatgggcctcatccaatcagttgacgagctgaatacaacaaaaggctgaccctgccctgtgcaaggggtaattctgccagtagacagccttcagactttacatgcaatattggctcttctttgttctacaacagcttttggactcgaagtacagcctttcctgagtctccagcgcactggcctccccccatcagattttggactctccaagcttccacaagcacaggagccaattccttaaaataaatctgtttctatatccatatatacacatcctattcattctttatctctgggcaaccatgactagctaatacagtctctaaatcaaactgtggtaccttctttactaaggaattccttctaatagctctatacccattggctttcacaacatgaatcaggggttgaaatttctgcatatttttctcagatctgctccaggcgacttcctttcccatggctagttaaatggggactggagaaggcggagaaatactcacatttttaaaagattacagctaattatgtagacacactggcccttagacctatcttacctggcattttataatttccctttcacacaatataatttaattcatatttgggggacaggaatattgatctacactgtaacttgtctagtttctggaacgataaactaaaacttcaagcatataaaatatgtttatactctaaatttttagttttttccctagtatttgtatgtctagatataattacaaagtctatgtgatgtttttcatgtgacgatccaatacagtgcttccctgagcccttaaaaaataaaaaataaaaatacaacttaaagaaacaaaaactccctaccgtagccgctacaagggaggctaaggcgggaggattgcttgaggacaggagttcgaggccagcctgggcaacatagtaagacttccgtcacaaacacaaaaactcccaacccgggttcgagaccagcctgaccaacatggagaaaccccgtctctacaaaaaatacaaaaattagtcaggcttggtggcacatccttgtaatcccagctactcgggagggtgaggcggagactcgcttgaatccgggaggcggaggtggcggtgagccgagatcgcgccattgcactccagcctgggcaacaagagcgaactccgtctcaagaaaaaaaaaaaaatcacctcccaaccgtatggaccacgctgacatcctgccatcaagaagcaaagctttccagcgtcccccaagcgctagggccgccttctgactcttccgccccgcctccgccccctgcactctcccaactggcgggaggagggcgccctcccagccaatcaacgtcccacagggcccgcctcccgcgcgtctttcaaaggtcttctaggaaccagtcagcgattagaggccgagtcttcggccacccaaaggcggagtaagaaaccagaagcggatctgattggttgctggaagacgccgcgcccacctcacagaaggacgaaccagtgagctaagctgcggggcgcgggctcggccggggcaccggtgagtcgccggcgctgcagagggaggcggcactggtctcgacgtggggcggccagcgatgaagccggtgagtcggacgtgctggggtttggaggagcgaggcggcagggacgcaagcggtcccggggacccgatcctgggccggagggcagccctagcctggtagcagtgcgactggcgccgtaaccgttctgcgggtcggggaggtgactcgcacgggcccagcacgggcacgagagacgaaggagcagggtcggtggccgacgaaggaaagacggacattcgctgtgcacctgctgtgggctgtcacctgtcccctgcggggtctcataagcctcccagccgcccagccaaagagggccgagcctcgttgtaccgaggaaaccgagccgaagagcttgagtgtcagcgatgagtgggcgcgataccccagccccgaagggtggccgggcgctacctgcgcccacagggcctggggaaaccttgagtacgaatgccacgccgcggcttgtgggcgacaccaccgctgtcaccatgccccagggccacctggcaatgctgctcttttcccgtgacgttcagaatcacagggcctggggaagcagaaacgtccagctctgttaggattaataaacctggtgaatgggccacacaaatttgaaatatgaatcatcaaagttgctttaaagaaaaaacagatgcaggcaaggagctgaagatcccccacctaacccatatttcctactgcccggcttgacaacctactggaagcctttcctttgggtgcagttgattataatacttcagatagagccaaagcaacagaaatccatagcctagggccgggtggtgtctcgcgcctgtaatcccaacactttgggaggccaaggcgggcggatcacttgaggccaggagttggagacaagcctagccaacacggtgaaaccccgtctctactaaaaatacaaacattagctgagcgtggtagtgcacgcctgtagtcccagctactcgggaggctgagccacgcaaatagcttgaacccaagaggcagaggttgcagtgagcggatatcacgccactgccctccagcctgggcgacagagcaaaaccctatctcaagataaaagaaagaaagaaaaaaaagtccgtagcctaaattagccgtcctgtgatcttctagtaccaagaccgttgtagaatatagcttcagagctagaaagagcattaggtgsttacaattgctaatccctatgttgccatgtggagggacatcagctgtccttcactcctggcctctttctccacctgtccccattgagttatctgatccccgagtttggaaggaactgaacaccagtatctcaactttttctttccttctttcttgggatctacctgcctgcctgcagaaggtgctttctggtccactctctggcacacaggagccccagactgtccatggccacctgtgactgggtggatacatttgtctaattctggggtgaacaaggggcaagcccacgtggcaacagctttaagctgcatactcsatttgatatacaataataaaactccatttctttatctttcaattggtttcaactagggagtgasaaaagggtatgggttttgttctgttttgtttttgtttttctttttcttttgattccttaaaatttcaacaaggagtgtagaagtcttccatgtcaaaatgctgcaggattaagttccaactgcttagatcagcatacgaagtctatctcaatctctctagtctagtgattcataaagttggaggcaggttatttcacctacaccacccccaccaaactactaggccatgtggggatgttttttgagaaaaggggtgggcaaaactacttcatctcctctactccatctctattttgatatcacagttcctcaatacacaagcccttggcttaacttctttcctttcttttttcttcttccttttttttttttttttttggcagagtcatgccctgtcagccaggctggagtgcagtggtgtgttcctggctcactgcaacctctgcctcctgggttccagggattctcctgcctcagcctcccgagtagctgggattacaggcatgtgccaccatgcctggttaatttttgtatttttggtagagccaggttttgccatgttagccaggctggtctcaaactcctgacctcaggtgacctgcccaacttcgcctcccagagtgctgagatttacaggcataagccaccgcaccctccctttcctatcttctttaaaacctgctcttccttcaaaacccagctaaagcgtttcctctgtgaagccttctccakctacctacgtggtcactctcttctctgttccacagtgtatagttctgcttccatttcagcacttatataatacctttcttctgtaatctatgcacacatctgtctctccagccatactgaaggcaggctatttatcttatagatcttttgcatctccagtgyttggcaaatgaaggtggccaagaaatatttgtgaatgaataaatctcctcactttatagttgaggaaaatcgagatccagaaccaactgaagtggcttgtcagagagtatacagtaagtggcagaaccaagatsaraagccagatttcttggttcccaatccaactctctttccactatgcagtgctataattattaataggaaggtaaatagcagtcatttattattaatattgctgatctcgttaatattctggattgatggctgaatacattgcaaatatgaattcagtgtgtgtttagacaaggattagctatcctaaaactacaaaaaaattctttacagttatttaacataacatttcttttgaagcccagttcaatacaaacaagtgagtttgactcatcagatgaagagcctattgaagatgaacagactccaattcatatatcatggtatgttagcatttctgatcaatgatgagctaaaatcacaatctacatcataaatgtaaatttagttacatcataatcttagtagaatgtagttcacatattgaaaatgttaagggattatccccctctgattatataattctaatcattaaaggatcttctaactccatgattcatttactatctataatacagaataagacccttttttttttttggcccttctttatacattctaactccatgattcatttactctttwataagaccctttttttttttttggcccttctactaacttagtagaaggaagtaagtaggaaatagaggtaggattgaaataatctcccatttagtatcaaaatctacttattcttttatgacaaaagaataatataccaaatatgagatgagatatttaatcatttctcattaaatcaaatcctaggtaatacttagaagtaatgtcacagtaatgcatctatcaacagactctgtttaagataaaagccacatcaatgcaataacaaaaagtttctacataaaatcagccttttaatcttggcaagtgacttatggttataccagattctttacaatgagcaatcaaatgctttctctcatcactgcaaatataatagtctctcttcttaagaaagcactatccctactgtcagaagagaaagagtgtcctaaaggtcttttgtcctgccatcaaatagcattactttccatttccacttaaaactcccatttaaacacaaaaattcatctaattttcaaagtcaggtggtatttagatgatgcctcctgttttcctttaaatcatcttctgacatgcagacaaggtgagcctctgtccctgagtactgcaaactgggaatatgatttcttcacattatttctttttaaccaaaaacctgtggttttcatcatatgaaattatatctgttaaggaagttctatttaaaaatcttaaaatagtaatgtagaataaatgctggggagaaaattgtccaatagtcattttccaattcattttcctaaatcactaatacaaattatctcaggtaatataccacaggataacataagtacaccgtatactaccggttggcaatctaggcattattatctttaaggtaaatttaaattaacttggttttttgttttcttgttttttgtagagacaggatttcaccttgttgtccaggctggtcttgaactcctggactcaaacagcctgcctgccttggcctctctaagtgctgggatcataggcatgagccactgcacccagcctaacttgtcatttttaagacttaaataataacaaagcaaataagtccctgttttaaaactttgtctttctatgtttttttttgtgaccaacatattgatacttaactgtgaattcttactttgtgactactgtaaaactttaacacaactttatttggtggcaagcacccatattgattaaactgaatttccatttataactttttaaaaacttaactaaacatgaaaaatttttcttcttttcaggctatctttgtcacgagtgaattgttctcagtttctcggtttatgtgctcttccaggtgggtaacacaataatgggcttcctatcaatatgtatatattttttaatatatttttattgcagtagcttttggggggacaggtggtgtttggttacataaataagttctttagtggcaatttctgaaattttggtgcacccatcaccagagcagtatacaatgtacccaatgtgaagtcttttatccttcatcccccttccacctgttccccaccagcccccgaagtccaatgtatcattcttatgcctttgtgtcctcaaagtttacctcctgtttatgagtgagaacatatgatgtttggttttccattcctgagttacttcacttagaataatagtctccagtgaccgggtgcagtcactcacacccgtaatcccagcactttgggaggccgaggccggcagatcacgaagtcagaagatmgagactatcctggacaacatggtgaaaccccgtctctactaaaaatacaaaaattagctgggcatggtggcacgtgcctatagtcccagctacttgggaggctgaggtaggagaattgctttgacaggaggcaggggttgcagtgagccgagatcgcaccactgcactccagcctggcaacagagcgagactctgtctcaaaaaaaaaaaaaaaagaataatagtctccagttccacccgggttgctgtgaatgccattttgttccttttcatggctgagtagtattccatggcatgtgtgtgcktgtgtgtgtgtgtgtgtgtgtgtgtatgtatatctcacattttctttttttattatactttacaaccccactttttgatggggatgtttgtttttttcttgtaaatttgtttaagttccttgtagattctggatattagacctttgtcagatgcatagacggcaaaaattttctcccattctgtaggttgcctattcactctgatgatagtttcttttgctgtgcagaagctctttagtttaattaaatcccatttgtcaattttggcttttgttgcaatcgcctttggtgttttagtcatgaagtctttgcccatgcctatgtcctgaatggtattgcctaggttttcttctacagtttttagagttttaggtcttaggtttaagtctttaatccatcctaagttaatttgtgtgtaaggtgtaaggaaggggtccactttcagttttctacatatggctagccagttttcccaacaccatttattaaatagggaatcctttcctaattgcttgtttttgtcagttttgtcaaagatcagatggttatagatgtatggtgttatttctgaggcctctgttctgttccattggtctatatatctgttttggcatgtgtaccatgctgtttttgttactatagccttgtagtatagtttgaagtcaggtagcgtgatgcctccagcgttgttctttttacttaggattgtcttggctatatgggctctttttttgttccatatgaaatttaaagtagttttttctaattctgtgaagaaagtcaatggtagcttgatggggatagcattgaatctataaattactttgggcagtatggccattttcatgatattgattcttcctatccatgagcatggaatgtttttccatttgtttgtgtcctctcttatttccttgagcagtggtttgtagttctccttaaagaaatccttcacataccttgtaagttttactcctaggtattttattctctttgtagcaattgtgaatgggagttcactcatgatttggctctccgtttgtctgttattggtgtataggaatgcttgtgatttttgcacattgattttgtatcctgagactttgctgaagttgcttatcagctttgggctgagacaatgaggtttctaaatatacaatcatgtcatctgtaaaaagagacaatttgacttcctctcttcctatttgaatactctttatttctttctcttgcctgattcccctagccagaacttccaatactctgttaaataggagtggtgagagagggcattcttgtcttatgacggttttcaaagggaatgcttccagcttttgcccattcagtatgatattggctgtgggtttgtcataaatagctcttattattttcagatacgttccatcaatacctagtttattgagtgtttttagcatgaaggggtgttgaattttatcaaaggccttttccagatctgagataatcatgtggtttttgtcactgattctgtttatgtgatggattatatttaatgatttgcatatgttgaaccaaccttgcgtcccagggatgaagctgacttgatcgtggtggataagctttttaatgtgctgctggattcagtttgccagtattttactgaggattttcgcatcgatgttcatcaaggatattgacctgaaattttcctttttgttatgtctctgccaggttttggtatcaggatgatgctggcctcataaaatgagttagggaggattccctctttttctattgtttggaatagtttcagaaggaatggtaccagctcctctttgcacctctggtagaattcagctgtgaatccatctagtcctgggctttttttggttggtaggctattaattactgcctcagtttcagaacttgttattggtctattcacggattcgacttcttcctgggagggaagaagtccctttagtcttgggagggtgtatgtgtccaggaatttatccatttcttctagatttctagtttatttttgtagaggtgtttatagtattctctgatggtagtttgtatttctgtgggatcagtggtgatatcccctttatcattttttattgtgtctatttgattcttctctcttttcttctttattagtctggctagtggtctatctattttgttaatcatttcaaaaaaaccagctcctagattcattgattttttgaatggctttttatgtctctatctccttcagttctgctctgatcttagttagttcttttttttttcttgagacagagtctcactctgtcgcccaggctacagtgcaatggcacaatctcggctcactgcaagctctgcctcccgggttcatgccattctcctgcgtcagcctccctagtagctgggactacaggcacccaccaccacacccagctaatttttttgtatttttagtagagacgggggtttcaccgtgttagccaggatggtctcgatctcctgacctcatgatccatccacccgccttggcctcccaaggtgctgggattataggcctgagccaccgcacccggcttgatcttagttatttcttgtcttctgctagcttttgaatttgtttgctcttgcttctctagttctttcaattgtgatgttagggtgtcaattttagatctttcccgctttctcatgtgggcatttagtgctataaatttccctctaaacactgcagattctggtacattgtgtctctgttctcattggtttcaaataacttctttttttctgccttaatttacccagtagtcaggggcaggttgttcagtttccatgtagttgtgcagttttgagtgagttttttaatcctgaattctaatttgattgcactgtggtctgagggactgtttgttatgatttctgttcttttgcatttgctgagtagtattttgcttccaattatgtggtcaattttagaataagtgcgatgtggtgctgagaagaatgtatattctgatgatttggggtggagagttctgtagatgtcaattaggtctgcttggtccagagctgagttcaagttctggatatccttgttaattttctgtctcgctgatctgtctaatattgacagtggggtgttaaagtctcccactattattgtgtgggagtctaagtctctttgtaggtctctaagaacttgctttatgaacctgggtgcttttatgttgggtgcatatgtatttaggatagttagctcttcttttgcattgatccctttaccattatgtaatccccttctttttctttttttatctttgttggtttaaagtctgttttatcagaaactaggactgcaacccttgmttttttttgcattccatttgtttggtaaatatttctccatccctttattttgagcctatgtgtgtctctgcacgtgagatgggtttcctgaatacagcacaccaatgggtcttgactctatccaatttgccagtctgtgtcttttaattggggcatttagcccatttacatttaaggtcaatattgttatgtgtgaatttkatcctgtcattatgatgctagctggttattttgcccattagttgatgcagtttcttcatagcgttgatggtctttgcatttttgtatgtttttgcagtggctcataccagttgttcctttccaggtttagtgcttccttcaggagctcttgtaaggcaggcctggtggggacaaaatccctcagcatgtgcttgtctgtaaaggattttatttctccttcacttaggaagcttagtttggctggatatgaaattctgggttgaaaattattttctttaagaatgttgaatattggcccccactctcttctggcttgtagggtttctgcagagagatrtgctgttaatctgatgggcttccttttgtgggtaacccagcctttctctctggctgctctttacatttttttccttcatttcaatcttggtgaatctgatgattatgtgtgttggggttgctcttctcgtggagtatctttgtggtgttctctatatttcctgaatttgaatgttggcctgtctttctaggttggataagttctcctggataatatcctgaagtgtgttttccaacttggttccattctccccgtcactttcaggtacaccagtcaaacataggtttggttgattcacattgtcccatatttttggaggccttgttcattccttttaattcttttttctctaattttgtcttcacactttatttcattaagttggtctccaatctctgatatcctttcttctgcttgatcgattcagctattgatacttgtgtatgcatcacgaagttctcctgctgtgtttttcagctccatcaggtcatttatgttcttctctaaactggttattatagttagcagttcctctaaccttttatcaagtttcttagtttccttgcattgggttagaacatgctcctttaacttggaggagtttgttattacccaccttctgaagcctacttctgtcagttcatcraactcattctctgtccagttttgttcccttgctggcgaggagttgtgatcctttggaggagaagaggtattctggtttttggaattttcagcctttttgctctggtttttcctcatcttcgcggatttatctacgtttggtctttgatgttggtgacttttgaatgggggtttctgcgtgggcgtcctttccgttgatgttgatgctattgctttctgtttgttagttttccttgtaacagtcaggcccctctyctgcaggtctgctggagtttgctcgaggtccactccagaccctgttttcctgggtatcaccagtggaggctgcagaacagcaaagattgctgcctgctccttcctctggaagtttcgtcccagaggggcacctgccggatgccagctggagttctcctgtaygaagtgtctgtcgacccctgctgggaggtgtctcccckttaggaggcgcggggttcagggacccacttgaggaggcagtctgtcccttagcaaagctcgagcactgtgctgggagatctgttgctctcttcggagccagcaggcagaaatgtttaagtctgctgaagctgtgcccacagccatcccttccgccaggtgctctctcctagggagaagggagtttatctataagcccctgactggaactgctgcctttctttcagagatgccctgcccagagtggaggaatctagagaggcagtctggctaccatggcttttccacactgtggtgggttccgcacccagttcaaacttccgactggctttgtttacactgtgaggggaaaactgcccactcaagcctcaataatggtggatgcccctccccccaccaagctggaacatcccaggttgacttcagactgctgtgctggcagtgagaatttcaagccagtggatcttagcttgttgggctccgttgggggtgggatccacagagcaagaccactcagctccctggcttcagcccyctttccaggggagtgaatggttctgtcttgctggcattccaagtaccactcagttggaaatgcagaaatcacccgtcttctttctgcattggtcttgctgggagctgcagaccagagctgttcctattcagccatcttgcccgggaatcccacattttctttatctactcattaattgatgggcatttgggctggttttacatttttgcagttggaaattatgttgctataaacatgtgtgtgcaagtatctttttcatataatgacttcttttcctctgggtatatacctagttgtaggattgctggtcaaatggtagttctacttttagttctttaaggcatctccacactgttttccatagtggttgtactagtttacatttccaccagcagtgtaaaagtgttcccttttcaccacatccgtgccaacaatatatttagaacaagtatttggtcaactaacacatcattctctatactgggcaataagtaaatttcacagaccatcagcactggggaacacactttgcgaagccctcatggtggactatagttaaaggaacatagatctacctttcagcccttccagatctgcagtcacagccctacacttgtactttgccaatcttaataaagcttaaagcctggagtacaaatgaggctgaggactacaaccaggtacttgttacagaagaaacacagaatacagaatccttgmttaggatgaatccctgtaattatattcctrgaaatataagaaattgaaattcatattcaaaatataattgaaacatataaatgattacgtgaaatgactttataaagtagctatataagtgtttaaacatacctgttacatatgacgaaaaactgacttttttacttgctttattattacttataggttgtaaatttaaagatgttagaagaaatgtccaaaaagatacaggtaggtrtaatatcacgcaaccacactcatgggttttttaaatgaatagcattgaaaaactctctgtcaaaaakaacaaatcagtttttttttaatatarmaataagttttcaatattgtgtgaagttccaaactatagacttattctgatatgtaaagaggtatttgtgaagaccatcatttacctaaccatggagttgcttttcactgattgttgtagttatattatacatataaactacatttgaggttagaatgtagaagttggcatgaaaaaaagtatgtaaataggaaactgacatattgctccccccaggtctttactgttccttgcagacttgactgtggtagtagaaattaaacatgagctgggaactccaagttagcagtgaaattgtgaatcctggatggaaaattttgagagccagcatctagatggaaaagacagaatgggaactggttgttgcctgctcaaggatgttcataccattatagccacaagtctaataatcctcataatctgccccaatttggaatttacatattgcatgatactaacaaatgtggattttcaaaagattttattctgattggcctggaatgtctcaaacctactagtcctaccgatatccttatagtatggcaaattaaaatgtatatattgcttgattctaactagtatagattttctgaatcttaaaaacttttcgtggttattctagaacatcagtttgctaatgtacttttaaaaatttattcctggtcaggtgcagtggttcacacctgtaatcccagcattttggtaggccgaggcgggttgatcgcttgagctcaggagttcgagaccagcctgggcaacaaggcaaaaccctgtctctgcaaaaaatacaaaaattaactgggcatgatggcgcgtgcttgtagtcccagcaacttgggaggctgagatgggaggatcacttgagcccaggaggtcaaagctgcagtgagctgagatggtgctgagatcacaaggtcttgctctgtcatccaggctggagtgcaatgagctgagattgcattactgcactccaacctggtggcagagcaagaccctgcctcaaaaaaaaaaaaaaagtattccttacctaccaaaaaaagacttaaagacagtaatagatagttgacccttatagtatttataaaacttttctgctttagacacacccaccatgctaggaaatttctatttggagaacatttaggtcataagcaaaatatatgtaatttaaatcattggttcaaagtcagtcttgtacattttggaatgtcatattcatttagcattttctataaaaacagtttccaatttttttcaaaatacttttttttctgcaatgaaatcttaaatggaatccagtacataaaacaggtcaatatgtttgattggagacctagaatctccctgcagcagttcctgagatactttcttagccctttctcagaaagttggaaaatcactggataataaaaattaccaaatgtgtacaaaaggcaaatagatgtatagtactgtacatctcagggattagttcatgagaaggtactttgtacttaaatagctacatgtccttggatttaagggacagggagagggctggagttgggagcacttasatcatccagttatttattttaaaccaaatgctcaatagttaatattgccataaagaagtcctagtgtatagaatgcctatagtattcatatcattataatgagaatagctaggtcacagaagtttaatacaggtaatgttttatttactggcgacctagtctataaaattaaatacacaaggatgtgttacagtgcagatatgagggagaatactagcacctctgacaccatggccatgctggagattttatatacaatactcagagtcaagcaaacagctaagtgatgaagtagcagacatggttgattttgtgagaaaaagaaaaaaagtgctatcatccttaattgaacatagatctatcataccttaattgatagcactttttttctttttctcacaaaatcaaccatatttgctactcaattttaagtgttttaagagttattttatgccaggcatggtggctcatgcctgtaatcccagcactttgggaggcggaggcgggcagatcaactgaggtcgggagttcaagaccagcctgacaaacatggtgaaaccccgtctctactaaaaatacaaaattagctgggcgtggtgacacatgcttgtaatcccagctacttgagaggctgaggcaggagaatcacttgaacstgggaggcagaggttgcagtgagctgagatcgtgccattgcactccggcctggtgacagagcaagactccatctcaaaaaaaaaaaaaaaaaaaaagagggggggttattttaaagcagtattcattgcaaaaaaaaattttttgcaagaacagcaattgacttattttgaaattcagtaaaaggcattttgacttgtaatatgaggtttaattctagaccccttttgattcagacatatcaataggcacttcagatttatagattgtcatttggtattagtttggcttaagaaatttaatttcatattctccctcttgatggtatttaaatgtgtgatgttttctatgtgtgtgtgtctgtgtatcctggtctattggcagaagaactaaagagctgtggtatacaagacatatttgttttctgcaccagaggggaactgtcaaaatatagagtcccaaaccttctggatctctaccagcaatgtggaattatcacccatcatcatccaatcgcagatggagggactcctgacatagccagctgctgtgaaataatggaagagcttacaacctgccttaaaaattaccgaaaaaccttaatacagtacgttcttttctccatacactatgtgagaaatgtctcagtcaaaatgatttctggaattatggtagccctattcagttatcacctacttcatagtttgttgtaaggattaaaaggtaataatgcactaggaaagcactggcacaatgtctggtacagggtaagtagtcaaatacgtgctgttattacttttcaagagtagggacaataaatgagtagatttggaaattgttagaacaaggttacaagcttttcttttttatttctttcctttagtcttagacctttagttgcaattttgggaccctcctttcccctcatcaccatcactgcctcacttattagcttttcaattgcttagttgctttcaatagcaagaaaatcaattttttggccaggtgcagtggctcgcgcctgtaatcccagcattttgggagactgtggtgggtggctcacttgagctcaggagttcaagaccagcctgggcaacatggcaaaaccccatctccgcaaaaagtatacaaaagaacatgccaggcatggtggtacgtgcctgtagtcccagctactcaggaggatgaggtgggggaactgcttgagcctgggagacagaggttgcagtgagccaaggtgacagtactgcactccagcctgggtgacagggagaccccatctagaaaaaaaaraataaagaaagtcgattttttcaaaattagctaccaaaaaagttacctctaagcaataagcaatcctaaaaatatgacttgaaaattacatttgatgatatgactgctaacagattgaaagagggcctctcattgtgtgtcagtggctataaaaacacaagctgctggtgtgaaagtttaaaacaaaagaagatgggttaaggaaaggggacaaaatgaggaggaaagaaaagcagcttggaggaaggccagagagagtggcaatgggcagtagatagtagcatggcaaagattcaaaggggcgatgtggataaaaaacaagagatgctctgccggaagtgaaacacacaaagcaacagagakccagccatggggaggaaactggactttgccgtgcataatgtatatttcatattctaataacctgcttaatcctttctcgaataaggtagggtattaaatagtttacgacctcaaaagccccaagttccttaaggacattgctttgagctagaagtatagaaattatatcaaatagccatggggttctcagggcacctagtcataggacaagcccagccaacttctcctcttaaacctatagcccaggggcctcatgccaacagtgtcagttctgaaggcaaaccaactagtacgagggtctttggggacacacacctgtttgtggccaaactgaactctgacatacagagaaatatagtttgcagaatatgcagtagagaactagaagccattctacatcctattgtttcccatcttcctctatggaaaaagcatagtcacttaaccagtactaattataaaagctaaatttcaaatagatccagttgatgatgtgaaagtttctgatacatataggtaaaatagtattagatagttaaatgtagctggggaaaaatattttccaacatagggccctatttttcaaaccattttgagatcttttttttttttttcaaataaatttttgaaagcagcctctactgaaaagtttccagaaatcaaactagctctgtttagtgaagtgaagcttaacaaattctactgtagctggttctggcaacccaaatgctctgatgtttgtgcagagtacaaacaggatagacagtagatgggtgactttgcatatgctgaatgtttcagtctcccataaaataaagcatctgacaactggcatttttcattgtcctagagctttcgaaggtgtcctacggtgactagtttattttctatccattctgccatctttgaggacccacacttctagacagctatagagcttatccttcagcaacaggatctggtaaacctttttcactgacctgttgtctaccagtgctgtctcactggttctgcctggacatttgcagccctttataaaattagtgaacaacactgcttgcctactgtattttgtagtttcttggggctattgtaacaaagtaccacaaaccaggtagctgaaaacaacagaaatttcttctttcccatttctagaggatgtaagtccaaaattaagatgagagcagagccatgccctctgagactgaggagagtccttccatgcctcttcctagcttctggtggtggccatcaatccatggcaggccttggcttgcagctgaatccctccagtctgcctctgtcatcacacacttcctcggatgtctgtgtctttgcatggtgttgtccttgtgtaaggacactagtcatctaggatgagggcctgctctaattcgtcttaacttgaatatacctgcaaagactcaaattctgaataaggtcccactcacaggtacaggataaggacttcagcatgtcttttggggggacataattcaaccagtaacacctaccgtgtaccacacgccaagactaccaaacgaggcacagtccccaccttcgaggaacctataactaacactaccatttaactgcaataagacaggagaggcagcacacaggaaaatgatcctttctgtaggagcacaaaggcattttaggaaatgaaatttgaggttttaaaagataagtaggaattcatcaaatagaagaaaaaagatgaaaatagcaaaaggtataaaatagtattaatcttgcaaaaagacactgaagtgttctatcttgatctttttttttttttttaataaggcagttgtctcttctctgtcacccaggctggagtgcagtggcactgtcatagctcactgtagccttgaactgccgggctcaagcgatcctcccacctcaggctcccgagtagctaggacttcaggtgtgcgccaccgtgccaggcttttttttttttttttttttggagagacagggtctcactttattgccaaagctggtcttaaactactggactcaagcagtcctcccaccttggcctcccaaagtgctgggattataggcctgagccatcatgcccagcctctccctttatatggtagatccagatctctgaaacagttctatgtctggaacactttgtggraagcaagttcacgagtaagactaggggtcaatacctattcagtcctctatttcacatcctaaagcaaaatatatatctacagctttacctacaatacaatacaatacaatacagtaattgatgtccataacgataagtcatccacactaaattaggctcagtataccctctaagtacattaggaagcatgtaatacattttttaggatctttgaaaatgacttaaatgaatagttttgctactgaggattaatctccatttttctggaaaatccagttatacaaaactgctaatttctttacagtgctagataacagcagctaatgttcatttacttcttactctgcacaaagctgtgttctaagtccttggcaaatgctcactcatttgtgagcctcatttaatcctcactctgatgtacatactattgctatcaccattttaaaggtgaaaaggctgagtcccagagagattaaataacttgcttagctttacacatctaataagtggcagagccaggactgaagcccaggcagtggtgctccagagcccatgctccagacttcggtgataccctatctctggactcctttagatacatgaayggttattatctacatggcatttgtgcagtaaccactcagattttgtttagacagaggaataatcaaagtgacagttggtaaaagtctgatttctatctattggtaacatgctccatttctcagatgtggatcttggaacctaaagaggtcaataagaagactctgcctatcttgatgcttagaggtgttcagaattcctcccaacaaagaaataagcacaccttgctctcagttgattaaatcaaaaatatttattaatcttcgtgtgcaaggcactgtgctaggcattagagttgtaaatagaaggcagaaagagcaagtctttagttgtaactagggatggaatgaaatgtacaaacttcaaaactgtatttccctttcagctgctatggaggacttgggagatcttgtcttggtaagaaatatatttctattatttttttaaccgccaaatagacaaacttctgtttccagaccatatgttcattttgtattaaaatggaaccaagcaaaatataagtttgctaagactcaaaggattacttaaggccctaaacatggtgttccctggaaagcttgggtgggagtgggaggtattttcagcattgttctggaggattctggcaaaacatcatttacaagtcttaacacctgcattcttattttttaacattttttgatgttcttcctgtggaggtgttataatagagtaacttccaaatagtttccatgggtaactatttatgaataccaaagttaattactatatgttaatttaaaaaatgttttaatgtactaagaaaaacaaaaaagagttcgtgaaatgccacactggagtagtagttatttttttagtgttggatgatatcaaaattgaaagcttttgtgtttcaaagaatactatcaaaatgacaagactacccatagaatgggaaaaaatatttgcaatctatatatttgataagggatttgtatccagaatataaaaagaactcttacaactcagtaataaagataggccgggcgtcgtggctcatgcctgtaatctcagcactttgggaggccaaggcagaaagatcacctgagtttaggagtttgagaacagcatgagcaacatggtgaaaccccatctctacaagaaatacaaaaattagccaggcatagtggtgcatgcctgtagtcccagctccttgtgggactgaggctggaggactgcctgggcccaggaggtcaaggcaccagtgaaccgagtttacaccactgcactccagcctagatgacaaagtgagatcgtctctctcaaaagaaaaaataataataataaacaaacaacataactgaaaaatgggcaaagtatccgaataaacctttctacatgcaagatacacatatagtcagtaagcacatgagaagatgctcaacatcatcagtcatcaggaaatgcaaatcagaaccacagtggataccacttgacaccaattaggaagggtattataaaaacatgaaaaataacaagtattggcaaggatgtagagaaattcgaaccctcatacactgttggtgggaatgtaaaatggtgcagcggctttggaaaatagtctagcagtagttcttcaaacaagtaaacattaacatatgacccagcaatttcactccaaagtatatacccaaagacttgtatacaaatgtttatagcagcattaatcataatagccaaaaaatggaaacagcctaaatgtccatcagttgacgaacagataaacacaatgtggcatatctatacaatggaatattatttgatcataaaaaggaattaaatacagacatatgctacaatatgtatgaaccctgaacacattatgctaagagaagtcagacacacacaaaaaaatattgtatgtttccgtttatgtgattgctcagaataggcagatctacagagacaaagtacactagtggttgcctatggcaggggttgatggggaatagaggatgacagcaaaagggtacacttctttctgaggtgatgaagtgctttaaaattgactgtggtgatggttgcacatatctgtaaatatactaaatcactgaatggatgaacactttaaatggatgaaagaatgaagccagtgttaaactctaattcaaccatacggtcatttaagatcataatttaactgtcaaaaacacacactaaaagtctcagtcttttaattcatttggaacaattacaccagtcttctgtatcaacagaagtcttattaaatataaaatgctgtaccctgtcactagttatttaataacatattatttttctgtcatgttccattagtagctgcttgtctcctactatacctgtytgacacaatatcaccagagcaagccatagacagcctgcgagacctaagaggatccggggcaatacagaccatcaaggtgaggaggtgggcggtgcttgcttggttgtggttggggtcgttgttacaaatacagattcatgtgtaaccaaaaggttacatatgaaaatccaaaagggcagtgaaatgaaaatccaaagcactctgttattcaaataccacttgcttatgcttttagtttttaaaaatttacaagtaaatataatccaggtagtctaaaaaagcacacaggatttcaaacaagataatgaaaatttgaacttcctggtttacttttccaggatctacctacttctcagtttttgccccagtccgttttgggaatggatcctctcacctaggacaatgagatggttattgttaatacaaacttggtacgttcttgggtagattcttggccaaaaaaaatctatggaagatcttgttatatcaccaaaacatttaataaagacagatgaatgactataatacaaaaaatggaaagcagtgctaattatcctttgcagtagataactggggacatcttccacatgtacattcccctaacacttcaaaacactgcactagcaatgccaaggatattgcattaatcatgttactgaaaagattctgcagatgtcacttcattttgtagatctgtaaagctaatgtgccttcttttcagaagcgtgccctctcagcattagaatccgctcatcagaggagtgggcaccaaagaatcctggctgttaggcagctccctagacttgagagcccatcttcccagggttggaggtctaatccagtgtcattaacagtgaattatcataattactgataaattcaccaagcaacctgattcttagggcttaaataaggtcattaacgggacaatccatacaagatccactccactgtacaggtctgaaacagacaactctctttatgttaaaaatcaaacgatgcggccaggcgcggtggctcatgcctatatcctagcactttgggaggctgagctgggtggatcacttaaggccaggagttggagaccagcctggccaacataacgaaaccttgtccctactaaaaatacaaaaattagccagggtggttatgtgtgcctgtagtcccagctacttgggagcctgaggcacaaaaatcacttgaacctgggaggcagaggttgcagtgaaccgagatcacaccactgcactccagcctgggcgacaaagtgagaccctgtctcaaaaaaaaaaaaaaatcaaatgatgcttcaaatccaaaaagttcacctctcttctcttgaaaacaaactacatggccatggccagatgtatatatgaatatccatatgttttacatctttaacattgcagataattaagtccatattactacagactcagtttatcacctcagcattctgtggcaaacaggcttgctggtgttagcaatgcagtttccacatctcaataaggatatgaaatgagatgattggcagagtaagaayatcttttgggaggctattaaaactccaaataaattatttaaagcttttattttgcttatctgctgagattagcaatacagtttgtttttaaaaaatattgtctatgaaaattatccctagtgcattatgtcatcacaaaaaagcagaagactagggcttctataaattgagaaatggattttgttaaatataccagttacttgctacagaaagtgctctgtccttcttaccaggggggaaaaatgttagcaaaaataatgccattatgtactgttttaatcttatttggtcctgtaagtaaagagagaaagaattttagacttaaaacatatccatctacatttcatttcaccttctgatttttagagacttgtagaacaatagtttttcacactatatggctttactaaaagataaaacttccccatgatgcaaatgcttccttacccaaaaagatgtagaattgtgcttagcaagtatttttttttattcctgatacctgctaatattgtgcccacactgataactagttttctacagtgtattccaatgtatctttacttttttcagcaatacaattatcttcatgagtttcgggacaaattagctgcacatctatcatcaagagattcacaatcaagatctgtatcaagataaaggaattcaaatagcatatatatgaccatgtctgaaatgtcagttctctagcataatttgtattgaaatgaaaccaccagtgttatcaacttgaatgtaaatgtacatgtgcagatattcctaaagttttattgacaaaactcgttgtgtctctttcatttcttataggaataggaaaattgggataggaaaattggtatgcaattttccttttagaaatgaattggttgttctggtatattctacctggaggtaatgctgaaaacatgcatttggaaaaatatttgaatgcctatttttaatacttagtactgcacttttacttcattttactgtttgtaaccactgggtagcatatgacaaagtagtaagtatgagaattggtatgagtgcccaaacttacttttaaatgatgtccccctccctctctattcctcccaaaacttcttccgctttttacttcatagacctccggaattgaaaaggatcctgtgagtcttccactcgccccctcccagtactggatcagccccaagggtgtttattcactatgggctggaacattttcagagacaaggaattcactggttcagacagctgctccaccttttgtccgccctaggaactacacggaatgagcttaatcctttcacatttatttcataaagaatttagctacagattaacaatttccaactctctcactctttcacttccccctatactatgaaacctatcttttttcatctttaaattcaactttgagttacccaaaacagtcatttgggctgtagacaaggatcacacacaatgtgtcaaacaaacacacttgttttaacagtcagtggtttcagtagggcttacagtagtcacatggctctcttggctactggtaattacaagtgtgaaccaatggcaatttggcaatgaccaccaggttgcagactcataggcacttccacaaaagacaaagtttcactacatcaaaatttcatttttaaataattattcaatgactggctgggcgtcatggctcacgcctgtaatcccagcacattgggagaccaaggtgagcaaatcactttaggtcaggggtttgagaccagcctggccaacatgacgaaaccccatctctactaaaaatacaaaaattagccaggcgtggtggtgcacgcctgtaatcccagctacttgggaggctgaagtaggagaatcacttgaacccggcggggcagaggttgcagtcagccgaacccaggggacagaggttgcagtgagccgagatcacaccactgcactccagcctggacgacagagagactctgtctcaaaaaaaaaaaaaatcatacaatgactaaacatcttattttgtctcacactactcttcttgctgctgattaactgcttgaatttcattacaaaataatgcaaaacaatgaccagcctgtttgggaatttcagagcactagtatgtattgtaatataaaatcaatatattaatagagtcatcccttgttatcctcagaggattggttacaggaccccccaccccacccccaacagcaaaataaatggatgctcaagtctctgatataaaatggcatagtatttgtatactttaaatcatctctagttacttataataccgaatacaatgtaaatgatgtgtagttattatactgtattggttttatttgtagtatttatttttcaaatagttttaatctgaggttgagtcagcggatttagaacccatagatacagacggctgactgtacttttatacataacgctgcttctagaacttaacattttatgaggatactaaggaaggtaggaggatcacatatcccagcagtatctaaatggttaacctagggatttcattttctcatataattaataccaaaagttatagcaagaaaagtttttttttgttgttttttttttgagatggagtctcgctctgtcgcccaggctggagtgcagtggcatgatctcggctcactgtaacctccgcctcctgggttcaagcgattctccttcctctgtctcctgagtactgggactacaggcgcgtaccaccatgcctggctaattttttgtatttttagtagaggcagggtttcaccgtgttagtcagaatggtctcaatctcctgacgtcgtgatctgcccgcctaggcctcccaaagtgctgggattacaggcgtgggcacccgtgcccggcccaaggaaggcatgttttttaagtacacactgtaataacagattggccttcttcatgatttttgtattataaccatacacaatttaaaaatcacaatttctattaaactttagacagtcattgatatttacattagccaatcttttacagtccccaatctacaatggttcaacttgggatttctcaactttacaatgctatgaaagaaatatgtattcagtagaaactatagttcaagtattcacacaaccattctgttttcactttcagtacagtacaatgtttgagatattcaacaccttattataaaataggctttgtgttagattattttgcccaactgtaggctgatgtaaatgttatgagtacgtttaaggttggctaagctatgatgcttggtaggttaggtgcattaaatgcatttgcaacttacattttcaacttatgatgtccggagataattccattgcaagttgagaagcatatatattatcattctctcaacataaatacataacttattcatgaatacttagaaaattgagagaaaatattggcatggattaatcaaatactttaataatcaactgaattttgaaagtacttgcatctctcaattcccacggcaagtgctatttaagcctctacatttaaaaagcttcagtaggccaggcgcagtggctcatgcctgtaatcccagcacttatgggaggctaaggcaggcaaatcgcttgatctcaggagttcgagaccagcctaggcaacatgatgaaaccctgtctctactaaaaatacaaaaattaaccaggtgtggtggtatgcatctgtggtcccagctacttgggaggctaaggttggaggatcacttgagcccagggaggtagaggctacagtgagccatgataacaccaatgcactccagcctggaagacagtgagaccctgtctcaaaaaaaaatttaaaaattttttaaaatgctcgactaaaccactttaatattaagtatacgggaaaacatcaactattctataacaaagaaacatgagatgtcagttactaaaatataattgtccagttaaagattccagcattccagggaaaagtattttctctacctaacctgtgtgatattccccaaaacaatgaggaaagagggcggagagagaatcagagtcctggtcattcacaaactagtggcatttgaaattgaattaacacacagactcaaccattatgcataaactacacaaggaaacatttaagacagcttttattaaatacaaaagcaaaataagctctaaggagtaaggtagggctacttaagggcgttttctgtggacagcggacacagcaccattaaggttagcttagatttgaacaaaccatgagcagacagctaactacatgttatgtttctcttagtagttttagggtctgcccagtaatcaagaaattttacttctccagaatacatgaacatgggaaccaaagaaatgtaaatatttcgaaaaagcactacacaataaaatgagacgcaatccttatgcaggtcaagatgttctccacatctacaatgtgcattaacaaaattaatgcagataagaccttcactccaaccccaaagatcttacatggttaatactattttccaaaatcagcagaacaagctgcagttacttcttttagacatttagctttggaactttgaatttcaaagtaaaattgttataagaaagctagtcaatatatttagcaatagaaccactcttttacttttgatatcattctgaggtattaattcagaaccatcttccaagctatactggtagcaccacagacttactagctgctggtcatactgcacatcaatgattggtttgagcaaaggagcttaaaatgatctaaggctagcatgattaatagtttccaaaaaggatgaacatgagtacttttatgagcaatgctagataaggtatccatgtttttctttcccctgaagaatgttgttttagaatatttttgccatcaaaatttctgatttacaatcatgatatacaactgagagatgtacatttatggatgttaaatgacataaataagtaaactagacacatacttttaaatatagaccattatttgagtgggcttgatacactgctaggatataaccacacctaaggtgaaagctcacccctacagggtataagtgatacacggaagtcattatttgcactatggcaatattccacgaactctattcataaacatagaaggagaagagaggtgttgtacaaaggattttgctggtttcaaagcacatacaactttatttcctttctatgtaaatatttgacatagcttcaaaatatattgatttggggagcagagaagagctctatgagaactgtttgcaggagtggtcgtcaaggtgaaaacactgaactggctttaaaagagacacatactgcaaactgctgtgtactttgttgccatgtgagagaccattatctgggtacatgaatttgactggtaggtctgtcagttcatggtacaatcagtgaggctaggaaactattacttatactcgatccatactcaagtcaaaagtggatggtcttggtcatttcctatcacttccctttcccatgaaaaataattcaaacttcaaacaaattagcagtttgtccatagcctgggaccaaaccctcctctaccctggaatgaggagtgaggaatatcattaagcattgagaaaactgtcaaacatcattaataacatttggatatgagtgttcaaataatttctacaccatacctccttagtattaaagggccatactgccacaatatagtattattactcagtaaagtaacggctaaacagacatttattatgttagggttttaattcaggacaatctgtggtatccatagcaacaaaaagttgttggtatagatataaccacagtgttacacaagatgcaataaaatagacacaaacagggaaaacaatttcctagagctagaaagcttttaaagataaagcacataataccaaaagtaactgtaataaggagaaaaaaaaaaagagtacctaaatgaacagctgttgctgcacagggaatgtttaacgtaaactgaattataaacccaggctaaccatgcctcagctgaacccacaggaataataggctagggccaccccaaagagattgatgtggaaaataaatccagagcaatgaaaagagccagtcggatattgtcagattcaagtatttcgtttctgctttctcttggtaagtgatctaattcataaaacactgacatggtaaaagtgggtagatattaggagagcaggtactcaatcttttaatcacttacatgcctaggaactcacaaactaccacaaagatgggtgaaactccctgtcaatcatctttgaggaatcagctgaagactacatatcttatttgggaaacatgagaaaatggcttccacaaatcccaaccagtaaacttactcctggagaatattctggaatagattattaaaaggatgtttgttaacacttatgaagtagtgtttgctaagagaggcagggttcacgaaaatattttgacaggaatactcaagtaacagccccaggaaacccatctggattatagaagacttggccaggtcttgcatgatcaaaagtccttgtgaacaagaaagaaaactaagtgcatgctgatgtaatcaggtggactggaaactgaatgactgcctgtgctcaaagcatgaatcttgagagcccagcaagtactcaataaataatttgttacatgaactgaccaagagtcagatccctctagttctccagactgtgaaatacaaggtctttaaagctttccttgttatggaacagtttgag

SEQ ID NO: 93938 - DNA, 13135 bp, Homo sapiens
tggaagaactttcagaaacattttaatcagtctagttccacactgcattttacttggctgattacacagtgtctacatctaagtgaaattctccagcaaatataaaatgtaaatccccaatgatacaaaagcattgtgtcctggatcaatggcagcattttttcctttcttattttttttgtctttttttgagacgtggtcttactctgttgtccaggccgcagtgcagtggcgcgatctcagctcactgcatcctctgcttcccaggttcaagcgattcttgtgcctcagcctcctgagtagctgggactacagtcacatgccaccacgcccagctaatttttatatttttagtagagatggggtttcgccatattggccaggctggtcttgaactcttgaccttgtgatctgccctccttggcctcccaaagtgctgggattacaggcgtgaaccaacacacccagcccatttttttctttcttcatattatacaaaatcatggtatatgttacattccgtgagctattggaatcaatggaataaggcatatcatgttgaaaagatctacactcatgtactattagcaataggtttctgttcattttccactatagggagttttccagacacccactgtcctccatccccagtaagctgccttttttgggacaagtggcagccgttgagttcagacggccaggagtatatgtatttgctcagtgagaaattaattaaggtagatgaaacctgtgacctaattggttgcaaccacggccatatttttacagcagtaacaagtgtatatctacctattgctatgtctgagactatttccttcacaggaaaatagatatattgaaatcaaaaccattttctcaaaattatggtcctggtagttttatcaatatgtgcactttcatattttgactcccatagaaatagttagaacgtacacagacaacctcctgaatgttaccttctctaacactttctaaatgttttctgtttgtgattcttttgaacctttcagtctacaatcctctagctgtagaaacagatatttttacattgagtacttatttgtttataggatttatagtcaaggcagcaaatacatttcaacttaagatgcactttaatgcctgctgacaatacaattaaaacgtctcatctaagttggatgtcccaaaaaccttgacaagaaaaccaataaaagtagtcttgcatcgtgtgtcctatttctttggagaataaaaggaatgcagattaattcaatgacaaaccatgggcaaaatattttaattgatcgtcatcaaagagaacataaaatcctccgttcttcaaatacttattactgtttttttttcttttctatttttaatcttgcaagaatcagtgcctggagaactggctcggctattttatacaggcttttgctactcagacaaatgtgacagccctcaaggaaacttaaaaacgtaattaagccccagatggttcttttaacctttactatattatcaaagcactataagctttaaaatttaaaaagtcaatttatcctgccacctattcacttccttcacccctctcctcatttgccttttccaaattgaattcataggtcaattttgatattcacctgttcgctcacattcactaattctttgcctttcacttgcttctttgtgcctgttctgcaaacccccagttctggttggatccagctctctgcaaatacagcttgactacttttcccagtctccttgacagctggctgaagccctgggactgatttctggtcagtgaaatgtcggcagaaaaggtggcaactacccccgggcttgacccctaaacatctgtgaaactgtctgggtctttctcttatgatcgtgaaggaattttggtggacttcgaggttaggagtagggtgtggaggggatgtagttatagacactcgatgtggacaattgacgatgtgaagagcgactgctacccctaaacctctttggaatgtgacaacagagaggaaaacaaaagccttcactttgttatgtctctgagatttgggagctgcttgttagcttcatttgcttaccctaatcaatagaattaacaccaagaatgggtccttcaatgctacaagacaaccatgcgacatttcccaagcatgttcacactccttgtctcctaaatgattttctcatacgcttcccccttttctttcctttcctcactctctgctgatgagcttgcttcttatttaactcagaaactggaagtaatctaaggagaatgtctataagcgccacacgatcatgtctccttactcacccagcatctgcctggatgggccctgcttccctggtgtcagcggtcctgtctaagatgactctgtaggtgtatatactggtaaatgttgcggatctttacgtcagactctcagctcttctttcctgtatttggacaatggaagaccttaacggagattctctacagatgcaaatctcccctacaaaagacaactttgcagggcgacttcaatctgctggccatgtggcagccgtctcaaaatttgtcaaagaaatatatttggggataaaatattttgattttctttcccgccccccctccttggccacaagataggatcttgctctgttacccagcctagagtgcagtagtgccatcatggctcattgcagccttgacctcctgggctcaagtgatcctcccacctcagcctcccaagtagctgggaccacaggcgtgtgccaccacacccagctaagtttttaattatttgtagagagtacatctccctatgttgcccaggctgctctcaaactcctgggctcaagtgatcctcccaccttagcttcccaaagtgcagagattatagacatacgccaccattcctggccttgattttcttccccagagtattcaacatctcatatacagtgaattggcaaggaggaaatattttaacatgcagtactctaagccaggggttctttagctacaaagggcagcagaatcacctgaacgacctattaaatcatggatttctgagccccacccccaaatttctgattcagttgttctggagtgggacctgagaatttacgtttcccccaagtctgcaggtgatacttctgctgctggtccaaggacacactatgagaaccattgtttacggcttgctaccaaaagcgtgatccctgaaccagcagcacagacattatccaacagcatgtaagaaattcagaatctctgtctgtctcagaactatttaactggaacttgcattttaactaggaggtttaacaaggtgcattctccaggtaatttgtatgcatattagagtttgaaaagcattaggattttaaaaaataggagggatgtaggactgaatgttttccttaaggcaaggagaagtctggcattgccaagtgtaaagaaagccaaatgttgagaactgttaagtaatataattacagtcgttcttttatccgtggttgcacttgctacagttttggttacccttggtcactgaaaataggtgaatacagtacaatcagatattttgagacagagagagaaactacattcataaaacttttattacagcatattgttataattattctgttttattattgttgctgctgatctcttactgtgcctaattgataaactagactttcttttaagtatatatgtataggaaaaacaacatatataggactagatacaatctacaatttcaggcatctacagggggggtcttggaatgtatccacctcaaataggtgtaacaccaaagcagcaaaaaactaacataactaacttcatttttgtttaagggacctttacctattcccacagataggcaaggataattatagagcagtgagatcatacacaaaaacagcaatcatgtagtttttcagaaagaactctgagtttaaaggacaagtaactatgttttgttaaagatttatggaaatactgtgacctgaccagggaaaagaagttcccaacatcctcacaccctcgctggtgcccagatatctgcagtcatcagttacctcttgccctgagccctccatcttcctcctgccgttgacataaaaagagccaaaaatttggaatgacttaagatggtactttagcatgatagtgtgccatcatctgggtttgctggctttctgaataaacgtgcttttcctcccaccaacccttgtctcttgagtttggcctttcaagcagtgaggagccaaacttgggtttagttacaggggtactactgtacatattatacaaaatagctataattttatatatatcttaattatatgtgtgtgtgtataatttgtttgtactctataaatacatgttatctttttttaaaaaaagacaacctgtgtaggttgaggagcttcagaatccctggaagcacaattagcaatccaggtgaccaagagctcagaatgaggcagaatttctagggtggcagcaggccaaagctaacactgactgacagctgagcttagaaattgtcaaaaatggagaagccactgggcaaattgcctgctacatgtctggcactcttactcctgggaactataaaagacttatgcttgggctgcttctgtcttccatgttcttaccttcgtggaagatgtaacgatggcaggtctgagagtaggaaaagatgttcggtaagagaataattctggacagtctcattaaaaggctggaagcagaattggccaacaagagatatatattgagagaacttttctaaccccttaagctttctttgtccaatatcaaaaactctcactgatagtaataaaatgcaaaggaatattaagaaagtgttacataagtaaatgtatcattttatctcctagtgctctggagagagcattttttaaacaattatattctttttatgtttaatatattaaaataacatttagtattaaaataataaccaatatttgaaacaaaaagtctttgaaaaattcttaagtttcttaaggaacacattataccaggtgaaagaagtttgcttaaagattgcaggtaattgttactcaaatcttttctaatactggtcagaaaacaaagcttccctaatctctacaataaaatgatatgagtattgtaataatatgttcaaaagctagtatatgtaggatgctttaaaattatactagcataaagtttttaaaaataatttcaactttcattttagattcaataggtacatatacaggtatgtgacatggttatatcacacgatgctaaggttggggatgcaaatgctctgtcccccagatatagaatgtagtacccaaaagttaggtttgcaactcttgctttccttccttcatccgcattctgtgagtccccagtgtctattgttgccatatttatgttcatgagttctcaatgtttagctcccacttataaatgagaacatgcagtatttgtttttctgttcctgtgttaatttgtttgggataatggcctccagctgcatccacattgctgcaaaggacatgcttttgttcttttgtatggtgtttagtagtccaacatgcatatgtaccacattttctttatccaatccaccacggatgggcacccaggttaattactgtgctatagtaaacagcactgttatgaacataaaagtatatgtctttttgggagaacgatttattttcctttggatatatactcagtagtgggatttctgggtcgaacggtagttctgttttacattctttgagacattaaaagctttaatttctttgctttccacagtggctgaatccatttacattcccaccaacagtgtataagcattgccttctctccacagccttgttttgttgttgttgttgtggttgttgacttgttttggttttgttgatgatttttgacttttaatagagacctacaggattatgacataatgggaccatctttagacaagcaaagatggaagagcataatgcctgggggtggggtaattagttgcgatacgagctacgcagcatgcaaggttgrcgtattgaaatggaggatgcacatacggctgtgattgctttgccaagtggacttgaaaggtggtcattctttgctgtgtataacgggcatcctggttctcaggttgccaaatactgctgtgagcatttgttagatcacatcgccgataaccaggatttacagggtctgcaggagcaccttctttggaaaatgtaaagaatggaatcagaacaggtttcctggagattgatgaacacgagagttatgtcagagaagaaacatggtgcagatakaagtgggtcaacagatgtaagcgtcttactttctccccaacataattatttcattaactatgaagactctagacgtttactttgtagraacaggaaagttcatttcttcacaaattgcaaatccgctagaaaaagaatgaattcagaatgcaggtggctctgtaatgctttagcatgtgaaagcctctctggctgtatccaaagcccttggggattttgattacaaatgtatccatgggaaaggtcctactgggcagcttgtctcaccagagcctgaagtccatgacactgaaagatctgaagaagatgatcacttcattatccttgcatgtgatagtatytgggatgttatgggaaatgaagagctctgtgattttgtaagatccaggcttgaagtcactgatgaccctgagaaagtttacaatgaaatagtcgacacctgtttgcataagggaagtcaagacaacatgtgtgtgattttttctctggtttccaaatgcacccaaagtatcaccagaagcagcgaagaaggaggcagagttgggcaagtacctggaatgcagagtagaagaaatcataaagaagcagggggaaggtgtccctgacttagtccatgtggtgtacacattagccaatgagaacatccccagactgccacctggaggtgaattggcaaacaagcaaaatgttattgaagccatttataaaagacggaatctttataaaaatgatgacagtgactccacatcaactgatgctatgtgctaaaactgctcatctagccatggagtttaccttcacctccaaagctgagtacagctcagctttgttgaaccttttaacatccgtcctcaactttaaggaaggggatatgacatgggtaagaatgatcacaccagagaacttcagcagtacaacttctggctcataactgattttttgtttttgtaaatttgacacttaagtaaacatgatttcaaaccataattcaaacataccttgatcctctaggtagtaccaggtggtactaattctactgaaactattccaaaaaaatctaggaggagggactcctccctaactcattctatcaagccagcttcaccctgaaacaaaaacctcacaggacacaacaaaaaaggaaaaccacaggccaatatctatgatgaaaatagatgtaaaaatcctagcaaactgaatccagtagcacatcagaaagttaatttaccatgatcaagtaggcttcactcctgggatgcaaaattggttcaacatatgcaaatcagtaaattcgtcacataaacagaactgaaaacaaaaatcacgtgatcatctcaataggcatagaaaaggctcttaataaaatccaacatcctttcataataaaccatcaacaaactaggcatcaaaggaacatacatcaaaataataagatccatctatgacaaacccagagccaacatcatactaaacaggcaaaagctgaatgcatttccctaagatctacagcaagacaaagatgcccactctcaaccacttttattcaacatagtactggaagtctttgccagagtaatcaggcaagataaagaaattcaaggcacccaaataggaaaggagaagtcaaattatctctctttgcagacttaatgattatatacctagaaaaccctaaagactccaccgaaagactcctggatcctgataaacaacttcagtaaagtttcagatacaaaatctttgtacgaaaatcagtagcatttccatacaccaataacgttcaagcccagaaccaaatcaggaacacgttctcatttacagttgccacacacacaaaaataaaatacctaggaatacatctaaccgaggaagtgaaagatttctgcaagaacaactacaaaacactgtcgaaagaaaatacagatgacacaaacaaataaaaaaattccatgctcatggactggaagaatcaatattgttaaaatggccatactgcccaaagcaatctacaaattcagtgccattcctatcaaactaccaatttcattcttcacagaattagaagaaaaaaaactagttcaaaattcacatagaaccaaaggagaatcaacatagccaaaacaatcctaagcaaaaagagcaaagttggaggaggcatcacaatacccaacttcaaagtatactctgaggtgataataatcaaaaccacatggtactggtacaaaagcagacacatagaccaatggaacagaataaagaactcagtaataaaggtgtgcacctatagccatcttatctttgacagaatcagcaaaaataagctgtgaggaaagtactccctattcaataaatggtgttggaatagctggctagccatatgcagaagaataaccgcaacctctcaccacatacaaaacttacctcaagatgaatgaaaaatgtaaatgtaagacctcaaactatgaaaatcctagaagaaaacctaaaaaacaccagtcaggacatcagccttaagaaataatttatgactcagttctcaaaagcaattgtaaataaaacaaaaattgacaagtaggacataattaaagagcttctgcacagcaaaacaaactataaacagagtaaagagtgtaaactttttaaaaatctatttaaccatctcacaccagttagaatggtgatcattaaaaagtcaggaaacaacagatgctggagaggatgtggagaaataggaacacttttacactgttggtgggagtataaattagttcaaccgttgtggaagatagtctggtgattcctgaaggatctagaaccagaaataccatttgacccagcaatcccgttactgaatatatacccaaaggattataaatcattctactataaagacacatgcacacgtatgtttattgcagcattaattacaatagcaaagacttggaagcaacccaaatgcccatcgatgatagactggataaagaaaatgtggcacatatacaccatggaatactatgcagacataaaaaagaatgagttcatgtcctttgcagggacatggatgaagctggaaaccatcattctcataaaattaacacagggacagaaaaccaaacaccccatgttctcactcataagcaggagttgaacaacacagacacagggaggggaacaccactggggcctgccagggggtgaggcaaaagaggaggagagcattagaacaaatacctaatgcatgcagggcttaaaacctacatgacaggttgataggtacagcaaaccaccatggcaggtgtatacccatgtaacaaacctgcacgttcagcacgtgtatcccagaacttaaggtaaaatataaaaatgaatctatttaaccttttatgctactgaaattttctgcttgtatttcaaccttacataagaaaaatatattttgttgtcatattaaattctttagttcttgcttaatgtgacctttctcatcttcaattggaaatgttttgatttcagaaattatagcgcatgttgaaagaagttactgatttttgtcatcatatgtatgcttatctgtctaattaggatgatagtactaaatttactaagatatgtgtgcatttcaatgcaatattaggctttaattttttttcctgggaaagaatgatgaaaaattgccacaaaattgcattgccggaaagataaattctatttgttttaataaagcacgttttaggcaatttggaaatgactcacccctcactgttcacttcgtgcactggttatgatgaccaacattatgaaggtaactaacctcatgaaggtaaacttttagaagagaggagtgaacatcaacactgaccttggtcttatatttaattctctgtcttctttgagccaatattaccataagttgtttactgaatcacacgtttacctaaaataaatcctttttatgccgcagttattgcaggtgacatagtatacacctactaattgtatatgcctcttgatttttttaagaaaacttttctgctggaatgaccaccgagtatgaacgcagttagtgattttctgctacatttagccacgttctgggtacttgattacacaaatggctttgcttttgagaagatatgcttcatttgagttacctatgaattttttcttttatctgattaatgttccttagactggtcacagatggactatatgaccagtaggggcatatttctggcaaaaaaaaaaaagtaattaatcctgtgtttgcttattcaatagatgaattatagccatgcccctcttgaggaaaaatgaggatacaaaaaattagctgggcacggtggcgtgcacctgtaatcctagctagttgggaggctgaggcaggagaatcacttgaacccgggaggcagaggttgcagtgagctgggatcacgccgctgcactccagcctggcgacagtgcaagactctgtctcaaaaaaagaaaagaaattttgcaattatttatatttcttcctatatacaattttcataattaatctttgaggagtagctcaatctcagtgtaatttacttaagcaccatgcacaagcaaaacatttattaagagctcatgttttgacaagaaagaaggcatgttaatttcctgataattatttagggctcttcatgcccataatgtgggtgggatttcacccagtgactcttacagcacgactctctattgcagattaaaatatgtttaatgaatcatcttccaaaaccaaagtctcgggcatccctctttctactcttatgtggtgtgtcttcacaggcgcatgaacggaacaagagtcacgtgtaacagcacggcagcttcccagctccacaccctctcccatttaaatattggccaagattcttctcgaagaacagctggtcagaagtgaaggtcccaaaggacctgataggaaaagctaagagactaaaagcaaatctaattgcagctattcatgccttttcaccaggatttctgaatcctctctcccatttcaaaatccccacgatagccttcaggatccttgttgattcaatttcttgaacagcattgcctatttatacccggctacaagagcatccaaatgagagaaaactcatcccatggtatcaggaggttctcttgcagctctagaacccctctgagcccagcaagggtacgttctacatggactgccacacccagccccatacagctctcacaaccctcatggtgctttcatccttatgcttctctgggtttttgatcaagttgcctgccatatactgcctccaatttacccagccatccacagacactgagccatcacatttacgaaaaaacacaagatacaaaaatggacatgtcactttgtatttctctctttttttttctcaaggctactaattaaaaagttttaacaaaaatagcaatggagcccaatgaattctccaaacagtttgtgaaactcattcatcacacaaatatgacagcttcagcagacatgctctcagccaccccacacattgatgcattctttaaactgttcctgttacagcccctcaactccataccactaatctcccaaaaatgctctcaggatttaagctctaagaaaatagtaaaaatgtatccattacaaatgccatggcagcgtcaggaaattaccgtatatggtctaaaaaggagaggcgtgcgtaatccaccccttgtttagcatataatcaagaaataaccattaaaaatgggcaaccagcaacccttgtgggtgctctgtctatggagtagccattcttttattcttttactttcttaataaacttgctttcactttacaaactcaccctgaattctttcttgggtgagatccagaaccctctctggggatctggatcgggacccctttcttgtaacagctaaaatagtgcaggcatgtaataagagctcaataaatatttgttgtatagatgattaagtgaccagaaaagcatctagccatattgcttggagttttcagaacaagcatgttatagaaccttagggtgtggagggagaccaatagaagacaatgaaaactgtggcaagttaagaacatgttgcatatttcttgtgtttgaaaaagggtgttactatagctgtgccatgaacgtctcagtatgcataaaatactaagaaggcactttttatatttctacattctgcagagcaggctgacaggtgagcagatagcacagaccagggataagtagtcataaaatcagtattgctctgaaatctgctcatccctaggagaaaatgtttttctttctttcttttttttttttttaaagacagggtctcactcccaaaatccaggctggagtgcagtggcatgatctcagctcactgcagcctcagcagcccaggctcaagtgatcctcccacctcagccccccaagtagctgagactataggcatgagccaccatgcccggctaatttgtgtattttttgtagatacgggttttcactatgttgcgcaggctggtctcaaactcctggactcaagcaatctgcccaccttagcctcccaggcttagtgctgggattacaggcaagagctaccatgcccagcctgagagaaaatgtcatctatgatgttgtcaagtggtggtgtcagaagaaagctacaaagagcaaatttggcatgaatcttttatgtaagtttctctatgttttgtgagcgtggcactgattgccctgtgttctggactatc

SEQ ID NO: 93939 - DNA, 36258 bp, Homo sapiens
  misc_feature (1)...(36258): n = A,T,C or G
tgttttttctaaaaatactcacagcaatatttcatcattccccatcaagagacagagtctttttcctctccccctgaaactgagtgtgactttgtggctgtctttataaagagaatacaatgaaaatgacaccacatgactttcaagactaagtcataaaaggcaatatagctaacttctggctttctgtgtcttggaacactcacccttgcaacccaggcaccatgttatgcgaaagcccaaagtagcacaaaaggaagagatcaacataaagtccatgaggaaaggaactgaggttcccagacaaacgctggtatcaactcccagacatacacacgatcatttctgacaattaagcccctaggctttgatcttctagccaaggctccagatactgtggaacagagaagctgctcctgctgtgtcttgtctgaatttctaatgcacaaaactcatgagcgtaataaatagttgttttacacctctacattctggggtaatttatcacaacaattttcttggagtaaacatacaaaaatgaaggccacagataaccttcataggagtagttttagaagaatggcaagaataaaaatctgattggagtggattcaagaaagaatggaaggcaaggaattaaaaatattaagtatatgaaacgttttcaagaacgttttctctagccaggcatggcagcacatgcctgtattccaaggtattcaggagctgaggtgagaggatcacttgagcccggtgaacccaggagactgaggctgcagtgagccacaatcacacaactgcactccaccctgggtgacaaagcaagaccgttaagaccataccaaaaacaaacaaacaaaacaaacaaaaagaaaacacacacacacacatttttttttctttaaagcacaagagagaaatacagttagtagctggagggagatatagggttaaaagagactttttcttttttaaagatgggagaaaatatagcatctttatacggtacagtaaaagaaggaaatgttgctaatacaagagagaaaggggagaagaaagaatgggatctagtacataagtagaggtgttggcttaagataaatggacatgcagttcatccattttaatgggagggtcatcagaatatcaagagtgtagatgcaggtaggtaagtagacgtgttgctaggaacttgtagaaattctatgtggattgtttctcttttctccgtaaaatggtaactacggttatcagctatgaaaggatgggaagaaagtactgcgagtttaagagcacaggaaaagagatgtataaaacagatatataaaaaaatgggagaggataaagttacaggattattcagtagtagcattacaggctcacctgagattagtatcatgagtttaaagtaaaaccagagcatggttgtatgttttcttctatggtgtagcaccacaggtacagacagggacaaagtgaaagaatggccataggaataagtagctaagacaagagagaacgtaatcactaggggaaagaaggtcaagaaaaagagaggccaagttattggatcatctataaggatattaaaatcactaagaattatgatagtagtactgcaaagggcaatgagccaggagctaaaaatcttcaaggaatgagggtgagtaaaacaatcttgctagatgattcctgcaaagaatggaagaggattagagtctggtggcataagattcaaaactgggcaattttaaggaggtagacagtgcaataaagaatgatgaggatgtctaccccacatcaaacgcaaatcagaatacccctcctcaatatctttattcatatggaacttctgcattttatactgcttaatcaataacttattaacagagaagttctaaggcagacctaaataaatggaaagatacttcatattcatggactgaaagacccacattgtaaagacgttaattctcccccaagttgagctactgaatcttaaccaaaatcctgaaagtttttgtttctctttatgggacttgacaagcaaattgtaaaatttacatggaagggccgggcgcggtggctcacgcctgtaatcccagcactttgggaggccgaggcgggcggatcacgaggtcaggagatcgagaccatcccggctaaaagggtgaaaccccgtctctactaaaaatacaaaaaattagccgggcgtagtggcgggcgcctgtagtcccagctacttgggaggctgaggcaggagaatggcgtgaacccgggaggcggagcttgcagtgagccgagatcccgccactgcactccagcctgggcgacagagcgagactccgtctcaaaaaaaaaaaaaaaaaaaatttacatggaagcacaaagggccaaaactagcctaagatcctcatgaaaaataagatgggaggacataccctacactattatggcaatgtagaactggcacataaataggcaaattgagcaatggaacacaatacaaagcctttcttgactttctatattcacatacatatggacacatgacacatgacagagatgacaaggcaaatcaaggagaaaaaaataatccaaatagatatatattttaaatataatactgttttttaaatgtatattttggtccatataaatcttcctcatttttttttaacatttatagtatttgcggagaaaaaaataagtctaaattcatacctgaatctttatgtcattcctcactccctcaaaaaacccaaaatagaaatcacaaaaaaataggatgaaaacacagaaacttttaaaatcttagattaggaaacacctttctaagcaaaactaagtaaaatctttacaccaaaattttttttttaattctgcatggacaaacatctcatcaacaaagttaaaatttaaaacccccaaacctaggagaaatacttgtaatatatatggcaacccaagacctaatttccttaatatataacaagtgcctacaaattcataagaagaaaccaaacaactcaccattaaaaaaaatttaaaaaagattaccaaaaaagtcaggttaccaattactttggaggaagagtggaagggggaaaagggttgtggctgggatgggccaaatggagagatttctgaggtaattatcaaagttttattttttgactagcatgatggtaagggtgttcacctcataataattagtaaactttacgtttattttgtgtctgcatttttacaataaaaaggtaaacaacaaaaacaattcaatagaaactggcaaagaacacaaatgaggaattcaaagaaaaaacaaataccttttaaatacagaaaaagtacattcataagctcatatataatttatgaaaatccaaattaaacaagcattaattttcattcagaatggcaataatgtaaaattggtaagagataatactggcaagcatgtgaaataagaggcttgcactgttggtggaacaatcactttgtatgataatatccatcaaaattttacatgcatttcttgtgatccagaagttctattcttaggaataatcctaaagatagatatgtctgcataagtctatacaattatgtttactggcacattacttagagaaaaaaaaactttaaaggtatgaactctgcaaccagactatacaggtttaaatctgttttgatatttaaaagctatgagacttgggcaagtcacttaaactttctatgcctcagtttcctttcctataaaatgaagataatattaaatactccctagggttatgacaattaaatgagtatataaatatatatatataagtactgtagctagcatataaagagctttatcagtgttagctattaacaatttgaatgtcaactagtagaaggctgaaaatctcacctgctatacccataagatacagtttaagttcacaaagccaaaatcagtcatcatgaattttagaatatttttaagcgaaaaagtcaaacataaatatttctttactgaccaccaaaatacattatcaatatgcaaaagtaatgcaaaactctgcacatgtggtgggggcggagggtgagggataaatattcaacaaattatctggcttggcgatttaatgtggcagtagaataaaaacatatagaaacatttaagagtttgctctctaccgcttgaggatgcaagatgtaagctgtatgtaacctggaagagggtcatcaacagaaccagaaaatgatggcacccagatcttgaatctccagcctctagacctgtgagaaataaatttcagttgtttaattaaaacacacacacacacacacttaagagttgaacttttcccgttcccacattttgtatccttaaacctatcttcctggaaagggaacaagtcaactttttgaggtccccagttaggactacaatacttaatcatttattgaagaaaaacagtatctctttatttagggataatactaaaagaaactcgtactattaattgggaaaagattaatatacatgaaataagcaaaaaatacccacataattctaaaatacattcatttattcaacaaatatgttaatgtgtgccattggtcagacactggctttagctgtgtagatgaaaaagtctttgtacttgtagagcttccattctcatgcagacaatataaatgaatggataactaaatacatgatatgatttcaggtagtcagaagtgctatgaaatggtaaagtatacaacactgcctgcaagtactatcggaattcaggatagggaagcttagaaaaaccaacccggaaggaattagtccataataatgcttaataaatgttaactagctacattattattatcattatcattatcatcttcatcctcattattgcattggtctctgaaagatgagaagctgtaaacatgaaggctaaatcgctgtggagatgctttcaagcataaaaacataagagtaggaggcaagaacgaacaagggaaatttgtgagacacaaaagaaagtagtctgatgagagcagagggcagagaagaaatgagacttgctaggtagaatggtcaaataatgggaacctttgaaataaaataaagtgcctactatgggggggcagttccttccctgtacgtggtgcctatctcaaggcaaaagtagagaagagatttacgacgaggattttattaggttggtgcaaaagtaattgcagagaaaaaagaagtgttttacggaggtcattttgacaagctgtatttgattttttaaaaaagagattaagataatacattttatgttatgtgctttttacctaattttttaaaaatgaagaagacagatgaggaggaggagaaagagttcagatgactgctaggagatgaaatcctataccagagagaagaaagaagagtgacccgttctgccctaggtcttttggttatttgaagtagctgcttctccaccccacccccagaaacagtaacaagcactcaccaccttcttcagagagtgtgtgagagaataaaggtcaggagagaaaacatgtttagtgcatctgaaaggaaacccgcgagttaaccacttccttctgtccccacccttccatctttctctaaatattggtgaggttatggagcttgcgttggcgcgcgggaagccgagaagaacgggactcaaagcccggctgggaagtcaggtatctagttggccggcgataagggtttcaccttcaggactggagctccacaagattcaaccgttatatcaacctccccggcccaggtcttaccatcacagcgtcacaaactccaggtcgcctaggcgctgcgcaggaagcgcttgccagccccggacttctgcgcgcgctgcatgcccattggatgtgctcattgccaccccagccaatcccgaaactcgctcggacgctgacagaagactgcgccgctgctttgggattggtagctgagttttgtgtcgcgccttttctgacgakgcgaacaacatggcggcggaaartggtagcgattttcagcagagacgtagaaggcgccgggacccggaggaaccggaaaaaacagaactcagcgaaagagagctggcagtagcagtggcggtgtcccaggagaacgatgaggagaacgaagagcgctgggttggacctttacctgtggaggcaacactggccaagaagaggaaaggtagctgcaracatagtaccgggacgaattggagtgctgcgtccgctgagtaggagggttcaagccagatccgaagagggatgatgtgtggagttttgtgccctcagaacagagggccgtcctctcacttctggctactccatacttgcatgtcttaacgaaatagtgatttaagcgtagtacaacgtctttttgataatatctaacacttttgatcattgatttgttatgacagatgctaaaactaacattttcctawtcttatgtgtttggctcctctcatttactccccacagcagccacatgaagttggaatttcgaactcttatttaggtatgcaaaagggtaccagttctctttaaggctttagttcaggagtggtgttaatgtattaatgtgttggggcgcgagaggaaggcggtgcttatttcgaatcatggtaggtaaagataatttcaactctgacacttccactaataaattttcgcatctagggaaaatgacgtaagcttcctagatcacagatttgttttcatccaaaacccgaagtctgrttttgaaatcacgctcttgatacgatgggctgagkcwttttgtcactaacgaggaataatcacaaattattatcaaataaaaggggtgggaaaaggggtagattaagttttcttgtctttgttgttttgttatcttgtttttctgtgaaatgttttccttaagtatttaagacattttaaatgtggtctaagctcaaatcgtactttagcacyttcccttaaaaaacttcaatgatttgtcattattttctctctcttttttttttttttttgagacggagtctcgctctgtcgcccaggctggagcgcatgcagtggcgctatctcggctcaccgcaacctccgtctccggggttcaagcgattctcctgcctcagcctcccgagtagctggggctacaggcgcacgcccagctaatttttgtatttttagtagggacggggtttcaccatgttggccaggatggtcttgatttcttgacctcgtaatctgcctgcctcggcctctcaaaagtgctgggattacaggcatgagccacggcgcccagctcattattttcattaaagcccaaactccctcacatggcatataaagccctttatgatgtgatctctccttaccttcttagtgcatcttccattaccttcctytcccaaccccttactttgtactccacccattctaaaatcactcgagaatcggtcttgtacttttttttcctctggattcctacccagatatggtgtttctaccgggaataatttccctcarctcttccactgaactgacttttggtcaacctttagcacttagctatcatcttctctgggaagcctgtgacttctccagtctggactggatttctgaagcactttgatcataactctgaggtagttatatatcaatactgaatttacaggtagccttcaaattttatgtatccaaattttgaagaagctgtttttttgaacgttgtatattgacacccttacagtgcattatcatttttacttcctggtcctcttattaaatgtttccatagtaaccattttatttatggcacttgccgcagtttctaattatatatttattcatgtgattgatgaatgtttctctccactgctaagactgtaaacaagtaagaaccagaatcacgccttttttgtttcattgcttggtgtacagtgctttgcctaagtatttaatgactgcatattaaagcttttatgctggtctttagctattttgttgcatatgaatatttttgcaagttcttttttaattaaacgagtaaggagaaatgtaaaaatccagaaatatcgaaatgctgatattagtgttaccggacaagtgtcttataaacttaatataacsgagacagatataaattagtaggtgtgaaaatctttcctcttaatcagttatttattgttttaagacagccaatagttggccgggtgtggtggctgatgcctgtaatcctggcactttgggaggctgaggcgggcagatcatcaggtcaggagttctagaccagcctgaccaacatggtgaaaccccgccagtctctactaaaaatacaaaaaaattagccgggcgtggtggcgcacacctataatctcagctattcaggaggctgaggcaggagaatcacttgaacccaggaggcagaggttgcagtgagctgagattgtgccactgtacttcagcatgggcaacagagcaagactccgtctcaaaaaaaaaaaaaaaaaagccaatagtttattcagtttgaagaaaaaaattgaaactaaaaaacatacatagaatgttacaaaaatatttaaaattttgtctaaatggacaagtatttaacaatttcagctttctagaaatggagtcaccccctttaacatgttcttkggacatkggactgtkgtatatattttcagaaagacatgattatatagcactatatctcttcaggacaggaactgtgttttactcttctttatgcccatgtgacctagaacgtattktgttcttartaagtatttgtccacaagtgaactatcacacagaaaaaggaatctggatcagataggattaagtttatctacatactacagaaaaacccaaaataacgatgttgaagagatagagctgtacttttatgtgtagaagtaccaagacaggcaggcagtccaggattggtgtggaggctccagaagttcctaggctctctccagctttctgcccaacataactaaggtacagccctcatcttcatttctctgaatgattattaagattacagcagtyatatcccagttccaagctataggattgaggaaaggaagaagggtacactttttcaagacttcctgtgacaaaacatttccacttttactcattagcatatggttaaacctcactccaggggaaagtgagaaaggtcatgttatatctggacatcagtatgcccatatataaatgggggttctgttcctaaaaatgaagggaaaagtagtttatcagacacaagcctgaaacagctcgtcatgtttaatttagcaactttttttaggcacgtttggtcatcgttcagttattttatttgggatacatataattctccyctcccctcgttccctccttccttcccttctttctcttccttcttctctccctccctcccttcgtctttctttccctcccttctttccttccttacttccctccctcattctctccatccctttctttctttttttttttttgctagtaaaattgttcatacctcatataataaatcagtatttcctgacattcctcagattactactctttcaggtggattttttccaggttttgccgttggaaaaaatttgagatacattcaactggatactccctaggatgttctcaggcrtaaaaatctaagaattttaccatgtttaaatgtttcaaacacagtgtcaataacttgaaagagaatcagtgctttaaatattaactgagacatcttacagatggccactggactcttttaagttagcactaaattatgtctacaatgttaggaagatggttgtgatattttcatggaacttttwaattttttttcctttttctttcttttttcttttctttttttttaatagaacattcacattaagccagaagcactcatttcttaagtcctggggacagttagcatgtatatagtacctgggaacctgttgtaactgactaaataatgacgctattcagtgctctgaaataatagacgttaaaactgagataacatactggattttttaattgtgaattgagaaaaactaaaatccaggagaaaataccaagtagagtgtagacaattttaaataaagaaaatacaaaatagtatttggtttatttgttaaaaatagatcttatactttacttttttttcttcagtcttagagtttgaaagagtctatcttgataatctccccagtgcatccatgtatgagcgcagttacatgcatagagatgttatcacccatgtggtatgcaccaagtaagtctatcacatcttttttactttgttctgagtttatttaaaaaaaaaaaaaagcttcaattttgaggtagatttatagagataattttaagattttgtagatttttaatttcttaagttctgaaataaaggcctacatgttctttcctatatcgtacaaataatgcattctctaagatagaacccctgagtttatatgtatgtctttggagataaatgccaagaggggagtgaaccaggtagygtctgagcttccctgaagaagagggtacattagttaagatatgagtaactggtacctggcctctttggcactagtggagaaaatgtgggctaacataccctaggaatagcaaaggaccttcaaaacagatgagtaggttcgtgkagaaggataataatagtacaagttgagcaccccaaatataaaatgctccaaaatccaatagtttttgagtgctgacatgatactcaaaaaatgctctttggagcatttgagattttctgattagggatgttcaaccagcaagtataatgtaaatattctaaaatctgagaaattgaaactccaaaacacttctggtccgatacattttggataagggatactcaaactgtagtaatattctactgtttgttgagcttatagtatgtcccaggtactatgctaaggctttttctttttttatctatcaagttaaggctttttcataaattttcttatttatcataaggataatcttgtgagttagtacatgctcttcattttagagatgacraaactgaagtttagagaggttagatagcatattaggctgctatttaaaaggcaagggctaaatcctagaagactttttatttcttgtacgggttttgaacctgtgagcaggagagtaacatcatcagatttatttttattaaaggaccaccctggctgtggtgagatgaatggattcaaacagggcaagaatggatacagggagataagttaggaagctggtatagaaatctggatgagatatggtggcttggatgatactagcagtgagtatgggaagtaggtggattactttacacttttttagatcagtctattcttgatgtcttgaagacaaatttaatttcatatataaatctaaataaaatatttatatttcatgtaaaataggataattctgaccaaatattagcaccttttctagtctcaagttmtcagtgtggtaaaacagtatatatatacatattagcattgctgtcactctcttctcaaatatttttgttttgtttttttaacccaagacaatggaaggtaatacagagaatataggttttgtggtgtggtagattgaaagccactctagctatatggacctgaggcaagtacatttaacattttaaaactatttcctacttataaaatgatgataaaaatacgtagagttgctgtaaaattaactaaggtaatatgtacaaagtacctgacatatactgggtttccataaatgatttctatttttacatacctaataggaaagattcttctgtacaaaatctttttgatacttaagtaaccaaaataccttgtataggatataaaaaaaacttttgttgaattttgttgcrtatgaaagtagtatgtttagatttacttatcagctactgacaaatagtttattttcttgtgaaaagactgtctgtagggtaattttagcaataaggaatccaaagtgtagtgattcctagtgagatttttattttaatgtcaaattctagttcaattctgatcctagctcttgaggttaaaattagtacagctgtaactgttttgacatccagaaaggagtttcaaaatttgcagtgttctgtaatatagtggtctgcttaaagaagggttttttttwaaaaaaaacctattatgcacaagtcagattcttagtgaatgattgctttgggaatactragtgattcatagatctgtcttagaaattaacttttaacatttcatatatgcagaacagattttattattactgccagtcatgatggacatgtcaagttctggaaaaaaatagaagagggaattgaatttgttaaacattttcgtagtcacctgggtaagaattgcacctcattttcttgtagctctttcctaaactatactaattaaagtttaaattttttaaattttttttctttgaatcatgcacacttaytttactgttatttactagaatgttttaatttcatttattgaaataggagttattgagagtattgcagttagctctgagggagcattgttctgttctgtgggtgatgataaagcaatgaaggtgtttgatgtagtgaactttgacatgatcaacatgctgaaacttgggtgagtctttttaaaagtatatntattttaayttattgaagtaatttgtaaatcagactttaccatttaataggttatttctaaatagtatattamcatatctttaaataaaatgtgctgttgggttttgcttggaaaattagatacagygaagccttataatgtttggaagcatctgctatgatttgttatcaatcacagaaatttctaaacagcatcataacaaggattccttatatccaaattgacattacttagtaatattactggagctctgtcatatctaattactggtagttacagttaacttccttgctttacttatttcagtaatatagaattgagttcctataagatttattcacatttttggaattaaagctatttattggtgactttaaactttggaatatattgatactaaaactatggttagattgtacagtattaagactgatactttgttttaagcatgtcttttttaagataacatagaatttatacacatctaaatgaatgtcagcttgaaagtcataacagtgtcagaaagttttgggactcgccttagtctgcttggatgccataacaaaaaaaccatagactaggtgacttaaatacagaaatctattttctcacagttctggaggctggaaagtccaagatcaaggttccatcagggtttgatttctgatgagggctgtctttcttacttctccctatgttctcccatggttggaggaagaaggaagggagagggaagaaggaaagrgagatctttttttcttcttataaggctacaagcccatcagattaggaccccaccctgactcttatgagctcattaaccttaattacctcctgaagaccatgtctctagaaattccaactgatggaattccaactgtgggctgaattatgcccacaattcaaataatttcacatcttagaatttccttcaaaatcagtttatgactttatgagccactaaaggaaataaatctcattatttatggttagaatggcacaaacatacctgtcttgatcacctgtcctactccccaggtttgtttcctcaaagctttccattcacagatattgaaygtttgccctttgagaatacttggaagagtatatttcagactttgatagaaattcttgaagaagaggtctggaaggttttgaacatcagcaccgtggttagaataatagtgtcacttctccgaatctctactttgaaggaaacaacattcatttttgagtgttttagtacaattgattagatcagtctgaattctgttatgccttgttcatcaggtagaatgtttaaagctttgagttttaatatcaagatttagttagtaatgagagtgttttaggacagtgtttttctttgacgtattgtcataataaaatatttgatttaaatatttcaagaaaggatttataaaatacactattacatgctaatctattttaaagtaagttatacatagactgttgtacagagatccaaaaagcaatgtcccagaagatcttaaggtccagatctgattaggtttccttatctgcccaagagaaataagtgtgctgctatatgcagttcttttcttatgttttgacagatccttagaactatcattatactgatgaggtcagaaagagaaaaaataagtaactattcttagctgttcctccccattctgtgtctctgctacttttgagcaaggaatccaaaactgtctaaatcaccagccaagacatttttggtagtgggatagggagggatgcttgcttgttgtgctgacctttttttttccctctcaattctttacgattttagctattttcctggacagtgtgagtggatctattgcccaggggatgcaatttcttcagttgctgcttccgaaaagagtacaggaaaaattttcatttatgatggccgaggagataaccagccacttcatatttttgacaaactccatacatcacctcttactcagatacggctaaacccagtttacaaagcagtagtgtcttctgacaaatctgggatgattgaatactggactgggcctcctcatgaatataaattccccaaaaatgtgaactgggaatataaaactgacactgatttatatgaatttgccaagtgtaaggcttatccaaccagcgtatgtttttcaccagatgggaagaaaatagctactattggttctgatagaaaagttagaattttcagatttgtaactggaaaactcatgagagtctttgatgaatcactaagcgtaagtgtaatttaaatttaaccgtactttacttttctaaaaatgctttattttatgccttttcttgaaagatcttttttctacagatagacatttagatagacttatttttttcttagcacattagagatattcaactgtttctgtcttgtagtgttgctctttgaaagtctcttctctaggggtttatgatgtgcgtttttcaagtcaattattgtcttatttttgtggttattttgttttttacaattttgttttgtttgcaagctgttaagatcctcaaaactcattctaggaccccttatcttctcactctttattcactcctgtccctatgactacttctaaatttacttctctaaccttctattacaagcaaacctggtgctatctcttgtcctgtcttcataaatggtgccagtatccatctagttgctcaaaccagaaatctaagagttatccttaactcttttacccttctgtgtaattcactggagtcctgccaattttgctttccaaatatactttaaattcaccaatttcttttcagcacagctgtcactaaccatagttcatgctcttttgcctgacctattacatggcctactacctgtatttattctggcttcttcctaatatccactctgcacccagggccatcttttacaagcatatatctggtcatgtcattcctttgcctagaacttttcagttaattccttctgttcttgggatcaagaccagagtcatggcttaccatgttgtgataccataagtcacctttctccctgccttttattctgccatttgggtcttctttttatttcttgaacctgcctcccaccacaggacctttttataagttgtttcctccacctggagtgaggccctccctcctcatatcctccattacctattgaactggtacttcaaatttcaaatgaagagtcacttcccctggaaggctttcactagtcatcctgtcttgcacagtttttttattttttattatttatttatttaattaatttattttctgagacagagttgcacttgagtgcagtggcatgatccagctcactgcaacctccgccccctgggttcaagcgattctcctgtctcagcttcccaagtagctgggactataggcgtgtgccaccacacttagctaatatatatatatatatatattatatatatatatatatatatatatataattttattagagatgggttttttttagtacagatggttttttttttttttttagtacagacgggtttcaccgtgttagccaggctggtcttgaactcctggcctcaagtgatctgcctgccttggcgtcccaaagtgctgggattacaggtgtgaggcacggtgccaagccagcagagttttttttaatgtgactgtagatcactgtttcttttagagcatttgatatggtcatattatttgattaatgtgtatcacctccagtagactaagccctatgtgatctgttttaactyatgattctatctccagcagtgagaacagtacctcacacaagagttactcaaatattttgaaagagtkactctagccatcacttgttagactgctaacaagaatttgttacagcatgtagtcgtggaataagagtttttaatccatgcagttaagcggtttctgtgattgcaactattgccatcaagtggttctctgaatcctctgagtctggattgaacctttgtagcaaagtttattgtatgacagtgtcagttcttttgtccttggcagtgaccaatttgcattggattccctgctgtaagctcttcataaattctgtcaactctttctagtggcgatcttgatttggtggcacgtggtaataaatgagttggttgtctgtctgtctgaagtaatatatttccagacaaatgtgaagatctgtttgccagccaaattatccttatgacaaattttcttgttggaagaagatagctttccactctgcttttaaggagaaacatttatcggtaatactttctttaatggtggcagataactaaatatgacttgcaatttaaatataattttaaaattctattaacttgcagctcttccaagatcccttaggcaaagaaatattcagaatctagtctctggacacaaatctcttttttttttttttttttttttttgagacggagtctcgcyctgttgcccaggccggactgcggactgyagtggctcaatcgcggctcactgcaagctccgcttcccgggttcacgccattctcctgcctcagcctcccgagtagctgggactacaggcgcccgccacygcgcccggctaattttttgtatttttagtagagacggggtttcaccttgttagccaggatggtctcgatctcctgacctcatgatccacccgcctcggcctcccaaagtgctgggattacaggcgtgagccascgcgcccgkccggcacaaatctcttaacacacatactctgagctgctcaatccactctatttgctcattgttgtcttcaacatttgcttaaatgattagcctgaggtgacaagaagtcagtagtagaacttaagacagaagtggagattcagaatgagagtttgccaraaaagccaaccatcagttaaattacttacagtgctagtgactagtaaatgactggaatctcaaggaggtggtagtggaggagggtagtttctaaccagtcggaatcctagtttaacagaaaagaaattgaatgggatggtgtaaattatcttttagtatttattaaccagggtcactatatatggctgtgcagttgaatatcacagaagccctgctatgaagtctagagcactctgaaaaagattctgatcaggtacttaccaggttggataacatttatggaatacttatatagggacagatgaccacctacagaccttatgccttaaaaactgagtcttctctccrgcagaaatgatcattagcccttccctgcaaaatgtgtartccagcatcctaggctattcctggcacatgaataagcagcgtaatatgtatcagtctccctgtctttgagactagagacaagaaaacctaacaactaggctttttaactgttctgtaagaccttgaccttgtgcttataccctaacacacatacctcattttgattttttgagttttgtatatagttctaaccttatctagaaaacacaagattatggttaatataagcatgaaataaggatagaattagatgggacagaagtctggcttattttcatctgcaatggagagctatttttgaatgctactgtttgatgccctgattgtgtagaaaagaatgtaaagatcgttactatcttttggaaggttcataatatgttaatacagttattgagatgtgatgcctatcttgaaatttgtgtaatatcaaaagaaaagtaaaccaaatttccaaactataaaggacacttatagaaatagtcatgtctactaaataacatgtacctaatggtaatctcactgccctgtgtcagaataacttgagacattttctgaaatattatgaatttgttataaattagtgagatgaattcattcagcaaaaattgagtgcttgttatgtcaggcacgtaaccttgctcaaggacctcatagtctatagctgcattatccagtataaacagtcactagccacgtgtctactgagcatttgatagatggctagtccmaactgagatatgctgaaagtgtaaaatacaagatttcaaagacttaattttttttaaaagaatgtaagttatctcaattttttatattgttaatgttgagatgatattctggatattttgagtttaatcaaacattaaaatgaaattcacctgttttctttatacttkaatgttactagacactttaaaattacctatgtggcttgtgttatatttcattggaaagtgctactctgtgacttttaaaaggcagcagatgtattctgtagagaaagcagtagttctattaaccaaccgggttttgttttaaattagaagaaccagttaccrttttgaaatacaatttttttttttttttttttttgagacggagtctcactctgtcccccaggccagagtgcagtggcgcaatttcggctcactgcagcgtctgcctcstaggttcaagcgattctcttgccccagcctcccgagtagctgggattacaggcacacatcaccatgcccggctaagtttttatgtttttagtggagacggggtttcaccatgttggccaggctgttcttgaactgatgtcaggtgatccacctgccttggcctcccaaaatgctgggattagaggcataagccaccatgcccagcctgaaatactattttttagtgattggacttactaatgtctatttcatattgtttagaatccctcttaagaagtacaaacagttagtggctcttaatatgtattctgcttctatttaaattctcattgcatatatagatagatgggttgatatagatataggtatatgtatatagagtttttgttactaaatggtttatttcctagatgtttactgaactgcaacagatgaggcaacagttaccagacatggaatttggccgacgaatggctgtagaacgtgagttggagaaggttgatgctgtaagattaattaatatagtttttgatgaaactggacacttcgtgctgtatggaacaatgctgggcattaaagttataaatgtagagacaaaccggtaagctttaatatgaggtatgttttttaaaaatgtgtttgtgggggaccatttcctccatcatgggaacagtgggagtattgtttgttccaagaaaagtggaatggccccaaatgtctaaacttaaccaaatgttttgactggatttttctgtggtctcttggttgtttataatcttatgtagaaagtttccactcatgtttgtaaaagaaatggaaagaagatatgcatagtttcaagttgttgtrtgttttttttaacaagtttgtctgtcttttgcttattgatttaaattagcctggttcatgttaaatgttgccaaagattttaaccacagaattcagcattacttcctgctagacataaaatcaaaagttaaaatgcatgaaaccacagtaagccttttttgtgaaaacagtccatttggtcttagtacaaaatagctacaatcagatactctcactgaatgtaaatgaacagaacttaatattttaaggagaaaaaaatgtcctgtacatttccatgtataaacatatttatattgtagttcttggcaatacaaaatctttgaagttttgcagaacagttaacagacatggaattttaataagaataggttaaaactgtataaacaaatgattgattgtttttaatagaccttacttttttgaacagttttaggttcacagcaaaattaagaggaagatacagagattttccatataccctctgccccaacacatgcatagcctccccattatcaacgtcccccaccagagtggtccatttgttccattgatgaacctacattgacacccagagtccatagtttacattagggttcacccttggtgttgtatattctataggtttggagaaatgtataatggcatgtatccaccatcatattatcatatagagtagttttactgccttcaaaatcctctgctctgactgttcaaccactgatcttttcaccatctccatagttttgcctcttccagaatgtgatatagctaaaatcatacagtatgtagtctgtccagattggctcctttcggtaatatgcatttaagtttcctccatgcctcaccacagcttgatagctcatttctttttagcactgaataatactccattgtctggatgtaccacagttkatccattcacgtactgaaagacatcttggttgcttccaagttttggcagttatgtataaaagctgctataawcatctgtgtacaggtgtttgtgtagtcatttcagctccttttggtaaataccaaggagcacaattgctggatcatatggtaacagaatgtttagttttgtaacagccaaactgcctttcgaagtggctatactctttttgcattcccaccagcaatgaatgagtgttcctgtcactccacatctgtgccaccatttggtattgtcagtgttccagatttgggccattttaatagatgtgtaatggtatcttgttttagtktggatttccctggcaacatatgaggtggagtatcttttcatatgctatttaccatttgtatatctctttgatgaagtatatgtgaaggtccttgggacattttttaattgggttgtgttcttattgttgtgttttaagagttctttatatatatgtatatacatatatatatacatatatatatayacacatatatgtgtatatrtatatacatatatatgtgtatatatatatwcatatatatgtrtatatatatacttttttttaaaaaaagagttttttatatattttggataacagtcctttatgagccgttctcctagtctgtgacttttcattctcttgattggttttttgttgttgttgttttttattgagatggagtcttgttctgtcacccaggctggagagcagtggcacgatctcggctcacaacctctgcctcctgagttcaagtgattcttgtgtctcagcctccctagtagttgggattacaggtgcctgccaccatgcttgaccaatttcttgtatttttaatggcgatggggtttcaccacgttggccaggctggtctcgaactcctgacctcaagtgatctgcctgcctcggcctcccaaagtgctgggattacaggygtgagccaccgtgcctggcctcatttctgttttttaaacctgaaaattatagctgcctaccagtttaaattgataccttttgkggggtagagaaacacttttaaaaatctttcactagttattttgtacatagataagatagttgattcccagcttttatctgtaaagttgtcataattggaattaacttcggtgattctgttgtataaaacattgttatatttttaggtgtgtgcggattttaggcaaacaagaaaatattagagtgatgcaattggctttgttccaggggatagccaaaaagcatcgtgctgcaactactatagaaatgaaagcttctgaaaatcctgttcttcagaatattcaagctgacccaacaatagtctgtacatcattcaaaaagaatagattttatatggtatgtgtaagtactaggagattagacggtaatgttccttccagtttggtttgacttttctttgtttgtaccttcaactgaagagaatgttggcactaatagcagacttcctaaacaaccagaataccatcttacattaatattgtagaattttaaagtagaagttgattttaagtatttctgtactgttttccatcatgttttgaaatttttcaacctcgtttccacaactatttgtgttgttttagatagtaggaagttagtggttatagtcataattacatccaaaatagtttcactgtgggattttaaaagtgtttttattttttcagcctttactcttgaatataatttatcttccccaaattagcacagcttccttctctaaatgcatttccttttttaccttttgacttttattttaatggtgctaccttggaattatatattcctgtggaattttttttttctcttctggagaactaaaagtactttgcatgttaactaagactgagatagttaaaatcaaactaccgtgccatgaaggagtagcacaattttatttgttcatccaagcaggaaaatcaaaagtatagagacctatgcccttgcattctatccttcacaatggaatcagagaactttttaagacccaaacgtgactcttattttctgcctaataccctttaatggtgccccagctatctatgctggctggccctcctcacttctgtagctttatctttcttcatttttcattcatttgctacacgaaccatactgaaagttcacatgtagttgagtgtgctttttaaactctgggcctttgcacaggctattcattctaccagccacacacctctctccaactcctaactcatacttcaagtttcagtttggaagcccctctgttttttggagatggcatcttgctctgttgcccaggctrgagtgcagtgacgtgacttcagctcactgcagcctctgcctcctgggttccagcaattcgcctgcctcagtctcctgggtagctgggattataggtgcatrccaccatacccagctaatttttgtatttttagtagtgacagggtttcaccatgttggccaggctggtctcgaactcttgacctcaggtaatccacctgactcagcctcccaaagtgctggaattacaggcgtgagccaccgcacccagcctggaagccctttttaacatcaagtctgagttagatgtgcctgctatgtttctcttatgcttcccctgtcatatgatgtgtcacactttttgtgtgaacatcaataatttatttttttggcctctgacgctgtgctcttcttctgaagataaaatccataaatacaggcactatgtcttcttcactrttaaatccagaaagttaggaaatgactayagcattacagtatattcattcattcctccaaaacattgtaaactgatgtaatgctattaaggttaacagcatttgataaatgtatgaaatagcagtttccctaccccaaccaaccttccatctaaatgggtaaatwcttttaagatgagaatttcatttacacctttcaaaattattactaaaaatktattagtatatgaaggaaaaaaattaatcgttttacctttaatttaactttgttaggaagtaaaaattacccataaaagataattcttggccaggaatggtggcttatccctgtaaaaacagcactttgcgggggcccaagcagaaagatcatttgagcccaggaccaagacctgcctgggcaacatagcaagacctcatctctacaaaaaatttaagaagctaaccaggcatggtggtgtgcacatgtggtctcagccatgctggaagctgatgtggtaggatctcttgagccaacgaattcaaggttgcagtgagctatgatcacaccactgcacttcagcctaggtgacagagcaagaccctattgctaaacaaaaacaggcaaaaaaggatatttcttgatatacactcaaaacacatacactaattttccatccactttattcaaaaaacttatattttttcttttccaagtttacttgtgtrttgatcaaagtatatatattcattataaagtttgaaaaaatagagaaacaaaataagtcattcactgtagctttatacagctarcattgttacgaattttctttgagtcttactagtacatattcttaagcaaaactaaaatggtatgcatatatatgaattttgtgtcccatttttcagatccaacatgaaataaaagtataattttacaaatccatatatgagctaaatcataatttttcagatccaacatcatgaaataaaagtatgattttacaaatccatatatcagctaagtcataactttaaaaaattcatataaacaaatagtacaacagacatgccattcctttgaaaactggagaataggatrttaaggtgatagcatcctaacttggttgtttatttggaatctatccaagcagatcaaggaatgacattaggcaagatagggatggaggcactagctttacgttcccataattaagttacatcagatagaggtkgcttaggagagagcatttctacttaaagaaacaggcctkgagaagtccagagttttaacaactgaaaggtttttctcaattcttcctagaccccaaggatctgagatttctacaacttcactgaaaatttgcattctttctcctatgcttcagggtttagattctaggtcagttgggactgtgaaaaaaaattaaggatccatttcagattcatttttgtgaatccttattctacctagcatggggtcctgctcatagtagtaataacaactgttaatatgtatatagtaccctctatgtattaggcactgttctccaaggacttaatatctattcgtttaatcttcacaactaccttcattgcaaggtatgtactgttatcatcatatatgagtgagggaagagaagaaatgaattcacatccccaaagtcgcagaactggaattcaaatccaaacaatctaaataatgaactgagcaacaaacaggtggcatgttaggccttactagaaggcataagtcgagagctaccacaaatgaaacaattattcttgttaaatgtttgcccaagaaaatttctaaccaaagaaattaaattccatttgaaatcaatgtgttcagtatgttatgtggatccttttcatattagacaatgtaaaaataatttaattgcctgacacatcctgtatgggaagtgattcctgaaataaggattctgatgtgaattcttacatttcttaagtacttcattagaaattctattgttcataaaatttttaccagatgaaaactttaattcgttgactcactttttactttcctccttgagtttaccaaacgagaaccagaagatacgaaaagtgcagattctgatcgagatgtttttaatgagaaaccttctaaagaagaagtcatggcagctactcaagctgaaggacctaaacgagtttcggacagtgccattatccacaccagcatgggagacattcacaccaaactttttcctgttgagtatgtataacaactgtttttattggcttatgtaattaagaatgtaaatgtgtatatctgaagaaaccatgcaacttaaaattcccgttactttgacttaaggaattttgaagaaacgtttgataaaaaacatctattcctgagctttctgataagtgttacggtagaaaatgggaaatttttatgcatatatactttataggttcattacgaggacaaaatgtattggctatgaaagtgctgagtgtaaactgtaaagtgatacacaaatgtgtatcactgttactgttaacagcacatctgaactctaggttttgtggattgctttgctttcctctcaaagcaaatccttaagagaaagataattatgtttccttaccaacagttgctagatacctactatctctttatagtttcagtagctctgtgttttaaaagtgaactacaagctgggtgcagtggcacgcacttgtaatcccagctattcaggaggttaagacaggaagatcagtggaggccagcagtttgagactagcccgagcaacacggcaagacyctatctcttaaaaaaaatttttttttattagctgggcatggtggcacgcacctgtattcctggctatgctagaggctgaggtcaaaagatgtcttgagctcaggagtttgaggctgcagttagctatggtcaaaccactgcactccaacctgggcaacagagtgagaccctgtttctacaaaaacaaattacaacaaaaccgtaagggcttcaattgaaaaaaaggtgaacagttttctggacagtttaaaagactgtaaaattaacatacaatgtcaaatacagtagagtatctctggccattcttgacccaaaaaatgacatcttttacaacacttttacttaaaagttcttatttattaacattttgaatatgaacgttttataccatatcttggtactcaacaaataactaggcagctctagactcttggacagtctcactttaagtgctcaaaacccatgtactcttcggccttgtttgctgatgtacttgggtacaagattctcttggttcgtccatttccagctcttagaagtattacatggtaatgaaccgtatgaaataattgcataattttcagttaatattattgagaaagcttcgtactctgagtgtgattgtcatttaaagttgaataaatttagatgtcatttctatgattaaggttttggccaagagtatgtcgctgtagcataacaatgcttttgtaagaaaatgacctttcycaggaacttaacctatactactacatgcagacctataatactatatggagtaaactaacttaagatattgggccaggtacagtggctcaggcctgtaatctcagcactttaggaggctgaggcaggaggatgtcttgagtccagaaagtcaagatcagcctaggcaatatagtgagaccttgtctcttaagaaaaaaacatatttttaaggtgctatggctgtattttttttgactgctaaatgaccttgaaattttaatactgtcaaactcaaatattagttaagcagtcatgttctaaagataactaagttgaacaataagaatatactacttacatgaccctccgtgcttgtcctgagattagagattatgaaaaaaaaaaacaactgtccttctgaaacattcagaagacatggaaaggaaacatcattaggaagcagaactgcaaagaaaactgttttaagatgctctgaataggtttcatatttgtaacatatgtcttaataggtgccctaagacagtggaaaacttctgtgttcacagcagaaatggttattataatgggcatacatttcaccgtataattaaggtaagttacataaatttcatgtcatataagaaatactgtattattacatagcaagagatttaagcgcaaggaatcttcttctctcacacttaatcagtttagtggaaaggaacaggaaaaatacactatggaagccaaaggaggagtggatggtcataaatatcaacatctagaatcaacaggaatagtggcatgattagaaacactgaagcaatattttgtcagcagctaaagtaaagggtaagataatgaataaagngtcatgctgagattacatcagtaacctaggtaacctctttgtcgtggctagatagggtctagatctagaagatatgatttttcaatcatagaggagccacagtgccatctgatctgtgagaacctgtaatataccagaggaggagagagaactcagcccctggattttgttgagcagctttccataaagtggatggggcactgatacagtgcttggtttctggcaggtcagaaacggcaggatgaaaagtcagatctcagggtcctaaaggaattagcgaaaaggctttccaggaaatccagagtatttggggaaagggagagggagaagaggagggcaattatataaaacataacatacagatcctaaaattgatagtattaactggctttatttrggttattgagaaagacagaacatgtctataaatgagaagacgacctttgcatttatgtttcaatcaaggtggtggttgggcaatggaaatacatcatccaaatttaagtgttaagggtttaatcaaatcactttatagtgacagttaatattacactgaatacaaagcactcttggcagaaataaaacttcaaagcgtacatatatcgaaaaggacaatgtaatgtttttgtgtactttctgttaagggctttatgattcagactggagatccaacaggtactggtatgggaggagaaagcatatggggaggagaatttgaagatgaatttcattcaacattacgacatgacaggccrtacacactcagcatggctaacgcgggatcaaatactaatggatcccagtttttcataacggtagtaccaacggtaagtacagtatcattgtttataaactacagattgataggttatgatgtaagagagtgaactcagtagaagagctgcattattctgtattttctgcattatttatatcatctagcagaatacaaatatgaaaatgatcaagaatataaaattatgtgactaatcagtttagaattggtaaaacaatactgccactgtagtaagaaatacaatggactacgattcaagatacttgagtttcaatctcaactctgcctctactgatgatgtaacctaaaataaattatttcacttctgtgagcctatttccttgtctttagaatacaaagattagagtatatgaattcacaattttgagacaatttcccccacattttagtatctctgaaatcagaatacattagatttgatgaaatacagtataaggtaacctagctctattgctatgccataacacaaaattataaaaattacctagtttttgttttggaattaagcactaagtgatgaagaagggaaaaatgtaactaccatctgccaggcacatagttttatgtagtattcacagtacttctactatcagtatccccagttttcaataatagatgaagaaacagtgagacatgattaacttgccaaaaggtcaagtagccaagctagcatttgaactcccacctgtctaatgccaaagtatgtgctgcataaactatttcaaactgcctctgaataaactgttcaggtaagagtcctccagagaccttttaaagccttagccacaattctgtaagccatgtgaagtaacttacctttagggaagatcttccagttccctttggtctgaaagatgcagatatttaattaaacattatactatgcttctattttttttaacacactggaaataacttttaaaagctgctacatttttattgctgagaaattattgtacttctttttaaatatatgctaaaggggagcgtaaacttaaattctctttaatttgctcaaccagaggatataatttaaagaaaytggggtttaccaagattttccatttgtcctccaacacagccttggcttgataataagcatacagtatttggacgagtgactaaaggaatggaagttgtacagaggatctccaacgtcaaagtcaatcccaaaacagataagccctatgaggatgtcagcatcataaatattactgtcaagtaaaataagatttgttttaatgtacttgcamataaaaatacaatattaaacagattattttacattaggaagcttaggacttgctgaatatacagatcatgtttcaaagatacagtatttttgtattttttattaaaggctattttttaaaaattacctttgacttttctcgcaatatttctaatcctgggaggtgataaattgaaatggactaaactcaggcaaatagcactcattataggtaatttctaatcagcctcaaattaaatattaaataattacagtactctcctccaccccctttcccatggttttctttctactgtcaaccatgatccaaaaataggtgagtacaatacagtgagatattttcagacagcaagaccacattcactaacttttattacagtatactgctatagttgttctattttattgttgttaatctcttactgtgcctaatttataaattaaactttatcatagatatatatatatgaaaacacaatatatatggggtttagtatcatctgaagtttcaggcatccactggaggtcttagaaggtatcccgtgcgatgacaactctattaaataatgacagtggtacacaactgtgctttaattttgaatacctgccagatattccgcccttatgtttagaagagtgcagatccctcctataagaaaaaaatactaggatatgatattatatgtcatttcctttgttttacaaggtttcaatgccaaatattttagtcttttgataactgtttagtaagtagtggtgagtaaagcctcaataaacaggaagttactttggtcaaagtgttatattccttaataattatgaaatattctttcaaatgaaagattcagaataagtgaatacctgagtccttagtttattatatgcaggttgattttcagattatttttctaacataggtaaacaattttttctgtcctcaagttatagtatatctttagaaaatataccattaagaagtatacataaaaattttggtatctaacaatggagagattagtagaaattggagcagtaaaacaatatgagcacaaattcttatattgatcttcttcacttacacttataactaacttcataactattaagactcactgcttcgtttccagaaagaaagactctttctttcagaaacttacaggaagaacattctcaacagacctgtgtagggaatttatattcttaagttttaaatcggcttaaacttttccttctattgatcagcaggattctttatttatttcgtgctacaaagttgtgagatagataggagattatgccagattgtgctcctgtaatgtatgctcctttttaaaagtagaacttaaagttagacatgaaaatgacttttcaatgtgacatttactgtttctaattttagttgtttagtcttacctacctagctttattcattcctaaaaatttaatctaaatttttggtaatattgccaccaagtggtgatgatgcctcattccccaacaaatacaattattttgctttgagtgaaaaccatatttgactaatgaatttttcgattaatatcaaaaacttaatcggcagacctaaaaacatacattgcccatgtctttttaaaagcatgttttaagttatcaggatataatttcatccttattcattagtccttttcatcctttattcttttagggaagaatacagctgtcttcttctttgttagcactttgccaattgagaagtatcccagtgttacataaaaagcctttctcttagcagtattagttcatgagctaccactaagttttgcaagccattttctaaaatggtcatttaaaatactatgttttcttatgaaacaagtttacatttaaaatttaaaaggcagtaacaaagtttcacttcgttcaatgtaaaactttagctccgccttcaaaacactatggttatattacttatttaaatgtggcctgcacattacttctcggccttttggctaagatcaggtgtagttaagatcaagtttagtatctgttctcatcagtaaatgtggcctatgttgcaaattcaaaacgttatttctaaaattttgctgtatcaaataaactacatctcaaatttgacaggcatgccaacccatacccattttgttttattttctctcctaaccacagcacaaataatgacttcttaaattggttacaactagcaataatattaggtagatggttcaagaaagagactttcaagaataatgatgggacttcttaaaaatgatcttaacattttattgctgtctatacttatcatatatgtagtgcaaataatggcttctgatggttataaagcattcctgaattatagactacggctatacacttgacatacctgctttatataacatacagtaatatttagacctaatacagaaattcagctactaggaaaattctaatatactgtatataaaaaagctctcttcttagtttcccagggaagactagcacagtcttaactaatgattagtgaaataatacaaccacaaatagtaataggagcttgagaaaaatatttctttaaaaatgaatcacacacaaacacctaccattatacatacattataatcaggcacaatttttcaattgtgttcagttatatgctaagaatgtgcattacaaagtttagcaaaattagtgaaaagggaagcaagttcaccttagtgttacactttttcttcaattaactagtaaacagttcaagttctcacaagcaatacaacaccttttttatttttcacagttattgaaatcagtcaaatattaaataatttaattcggaagtattatttatgcacacaaactacacctgtaacagcatgaccttttacctgaaaaataaaggatgaaatattacatttatttatttacatattgcccataatactgataggctttttttttaatgctttgttttctaaaacttgtattgtttttaaacaaaaatagatttgaaaagaatgaaccacaacagtgctaccaaaaagtcacatcttgttaccagacatcactgtccttacaacaattcaactaataagatttaagatttaacttcatcctaatgtatcagaacattaaaaaaaaaaaagtctcaatgtacctatttaaataaatcgtgcttccataataatattctttaaaaatgaaaaacagtaaagagcacacatttttatttactcacaacactgaataattaatgtaaactttttgaattttttttttctttagacatttttcctctagagtaacttttcaaggccttctcatgaacagccttaagttttattgtcaaaataaatgcacttattttgggaaacagtttgaagtaagtaataagcatttgccactgtacttacaacttctcttgaagttcgctttctatttaggtcactagcttttaaataaagccaaccctggttctgcgttacttactacattttacctatagtcattcccacaaaggatgcaatattatattagaaagaaatattactttaaatttgttgaaaaatagaaggaccaatttagagctctgacctaggttcagtcctggaaatgggtctttcataaattcagatccaattacttccacagttttattactgttcagtttattactaacctgacaagcctaattgggtaacatttcactccctcattgtgttttatacaaaatgctgtaggagaaagttaataaaacactatataaagtattaattttctgtaccttatagttcttagcattaaaggtgttctgttaactctgaacataaacataaagtaatcctattatccaaatatgtagtttggattctatttcattaagcaactgtcatttctactactaaatgctgccaacattcagtgaaaaggcaggttaaaagaagcagctatacttcacttgcttcacacagaggtctcattaggcactcaattggctattcttttttcactgaaagaataaaccttcacttaccctttctctgtgactacctctttcccagtatattggtcacatattatctgaaaaacttaaataacaaatatactttttaaaagaatgtatattcaataagtttctatttaattcaatctaatctgctcaattagaaatttaattctgccacaaaatttttttaaagcaaagtactgaattcccaatccaagattcctttatatatatatatatatatatgcatcctaaattaccatcttttgagatgtataatttcttaaaacatactatgtgcaaagttacttttaaccacaaaacttcaaacaactgctgcctttaaaatcaagcmacatccaatactccagcagctacaagttgccgtgagagccagtccaacccttcatacagtcccataccacttcgagcatcacagscctgaatataccagctacggccacagcataatttatggagactgagtagttcagtgatttcttctactgacagtgctccagcaacatcctgaaagatatatacacatattttttatcagtccatccaaattataatttttctaattatcaccatttatagagaaatttgttgacagtgttctaacagaagcctaaacaaaaaacctagattcatctttcagtaattagtctgagattaataagaatagaaaaaattagtttggtttaactaatttatatgtgtgtgtatgtatatactttgtaaggctagcttaacaatgaaatcaataaagtccttgcaacctaaaaggaaacatactgcctaagtaatttttttatcttttaagacagagtctcactctgtcacccagactggagtgcagtgacatgatcttggctcactgcaacttctgcctcctggttcaagcgattctcctgctttggcctcccaagtagctgggattacaggcatgtgctaccatgcccggctaatttttttgtatttttagtagagatgaggtttcaccatgttagtcaggctggtctcgaactcctgacctcaagtgatccaccaacctcagcctcccaaaatgcaaggattgcaggcatgagccaccacgcctggcctgcctaagtgtaaggcatcaacttaaaaaaaaaaaattaacacatagaaaccttaataaatggtttatatatagggttatatattgaagagttcactacattcccactctgaacacccattgccccaacttcccaggagcaaccaccagttacaacatatttttccagaaaatttccatgcacactcatgcaaagagacacaaacaggaacatagtttagactttctataacttgcagggttttctgtttgttttttacgtaaacatgttgaagatgagtatctttccattatcagcacagatggtctgcattatttttaatatcagaattcccttccattgtgtggctgcaacataatttaaccagtcctatactgaatgttcagattgaagttttatgcttatgtgctattataaatccatatatatacacatacatacataaacatacatacacaaaagttgacatacatttatgtatatttgcaaaattatctgtaggataacctttggatatctgtctaccagatatataaaggtagaattgcagggtaagggactttgatgagtattgccaaattgtcctccaagaaaatgtctcagtttaataacccacgaacagtgttgaccaggcgcagtgactcacacctgtaatcccagcactttgggaggatgaggcgggcagatcacttgaggtcaggagtttgagaccagcctgaccaacatgatgaaaccctgaatctactaaaaatacaaaagttagccgggtgtggtagcaagcacctgtaatcccagctacttgggaggctgaggcagaagaatcgcttgaacctaggagggggaggttgcagtgagcagaggttgtgccactgcactccagcctggtgacagagcaagactcagtctcaaaataataatagtaacagttgtatataagtctgaggattataaaacactttcatctttaactatctgatgagcagaaaatggtatttcactgacttatttgcatgtcttaaatat

SEQ ID NO: 93940 - DNA, 25773 bp, Homo sapiens
tttcctatgtctatattatttaaaaataaaatatttcaaaatagaaagtattttttaagaccacatattgtatgaaatcaatacatgaaatgtccagaaaagggaatttagagatagagggcagatcagtggttgcttgcagcttggagatagaagcagggattgactgcaagcaggcatgagggaacgctacgcagtcaaagaaatattctaaagcagaaatgtggggctggttacacaacttcgcaaatttacttaaaaaaaatcactgaattgtacagtggctgaatattacagtatgtaaattatactttaataaagccattttttaaaaaagcaatataaacactcagttaaaccagaattctccaaaggcctcctcaagcagtcttacctgagattcctttaatgcttgctttccccaccaaattgggttggcatcaactacaataaccagaagattcaattcatcttctgaaaatattaacaagaaataaaatttaaaacattagctccataaaaatgaatcaaagctaacattcccaattcataaattaaatccagagcaccactatatgccttaaatgtttatcaccttataattatgagattaacagaagacccagttaaagctttaaagctgggcagggcgtggtggctcacgcctgtaaccccagcactttgggaggccgaggcaggcagatcacgaggtcaggagatcgagaccatcctggctaacacggtgaaaccccgtctctactaaaaatacaaaaaattagatgggcgtggtggtgggcgcctgtagtcccagctactcgggaggctgagccaggagaatggcgtgaacccaggaggcggagcttgcagtgagccgagatcacgccactgcactccagcctgggccacagaacaagactctgtctcaaaaaaaaaaaaaaaaaaaaagctttaaagcacagtgggcccttagcaagttcttgtctacgtcctgaaccactatatctccaatgcactaaatgtaaactctgtgagggtaggaatttttgtctcttttgttcactgcttatcctcactcctaccacactgcctagcacattgcagctgctcaataaatatctactgaacgagggccaggtgtggtggcacaggcctgtagtcctagcactttgggaggccaagacaggcagatggcttgagctcagaagttcccaagaccagcctgggcaatatcgcaaaaccttttctctactaaaaatataaaaattagggccgggcgcggtggctcatgcctgtgatcccagcattttggaaggccaaggaggggggatcacttgaggtcataagttcaagaccagcccggccaacatgttgagccaccccatctctactaaaaatacaaaaaaaaaaaaaaattagctgggtttggtggcaagcacctgtaatcccagctactcgggagactgaggcaggagaatcacttgaacccgggaggcggaggctgcagtgagccaagattgcaccactgcactccagcctgggtaacagagcaagacttcatctcggggaaaaaaaaatagccgggcatggtggcacatgcctgtagtcccagctactcaggagggtgaggagagaggatcgcttgagaccgggaagtcgaggctacagtgagccatgttcctgccaatgcactccagcctgggagacagaatgagaccccgtctggaaacaaacaaacaaacaaacaaacaaacaaaaccacctactgcattctgaatgcctggtcaaggacagaaggcactggttaactagtagtaggaatcccagtggtagaatttcaggagcaaaaaattaaagggaggcgtagctgtcaatttggcccgtactcatcaaatcatgtagcagcaaggccaatcgtaattaagagtcactttttaaaaggtaaaaaaaccaggctgggcgcccatcccagccctttgggaggctgaggtgggcagatcactgaggtcaggagttcaagaccagcctagccaatatggcaaaaccccgtccctactaaaaatacaaaatattagccgggcatggtggtgcacacctgtaattccagctactcgggaggctgaggcaggagaatcacttgaacctggcaggcagaggttgcagtgagctgagatcttgccactgcactccagcctgggtgacagagtgggactctgtctcaaaaaaaaaaaaaaaagttaaaaaacagagggaaaagcaattcctacgtcaagattttactgttaagaggaattctattctctaaactaaacaggctaccacaacacattaatcattcatttggatttttgttttttgggttttttttaagagatgggggggtctcaataaattgcccaggctggtcttgaaatcctgggcttgtgatcctcctgcatcagcctccccagtagtaaggactacatgcacgcaccaccccaaacacattaatccttcaacaaactttcacactaccagtgttaggtgttggggatactgggtccaacccctcaaagagactatactctaattgaggtgacagacagacatacaaacctgtgagtatacactgttatgaaaggcccaggatgctcatttatttatttatgtatttttaaacaaatttttgagacaaggtctcaaggttggagtacagtgccacgaatatagctcactgcagccttgacctcctgggctcaagtgatcttcctgtctcagtctcccacacagctgggacaacaggcgtgcactaccacatccagctaattattattttttttttttgagacggagttttgctcttgttgcccagggtggagtgtaatggcgcgatctcggctcaccgcaacctccgcctcccgggatcaagcgattctcctgcctcagcctcctgagtagccgggattacaggcatgcaccaccacgcccagctaattttgtattttcagtagagacagagtttctccacgttggttaggctggtctcgaactcccgacctcaggtgatctgcccgccttggcctcccaaagtgctgggattacaggcatgagccaccacacccagccacttggctaatttttaaatttttgtagagacagggtctcactttgttgcctaggctggtctcgaactcctgggctcaagtgatcctcccacctcagcctcctaaagtgttgggattacaggcatgtgccgccgtgcccggctctaggatgctcatttaatagcaaagagcagtaatgcctttcctccctccatactttgcttcctgcagtcctgtcttctacattaggagaatctctaccccatctttgatttctgtgtattcaaatcccaattactcctcaaagccccaaaccagcgcaaactctttcttcttcatgactcccctatctcagagcagaaggaatgccagcctcctctgcactaagcaccggaatctgcaatcccaaaatcccattccaccctgacaaccacccagcaaaggacattttcctgccatttttcatcaattataagatgacccccaccccttgttttttacattgaatagttgttgacatctggatggtatctttatcattaagattagcagcattttttctttcttaatggtatattaaataagggcacatctcataatcaatattatcttagattagctgaaatatgatatatggtattcgtattctgcaaatgaaagtaacttgtcctaagtcacatatggcctgctaacaagtggcaaggccaaagccctgttctaaagacagatctgcttgactataaagactgtggctcttcactgccccactgcccacctctgacaacccacagctctctcttctaatgacacttagcacttactattttattttacagttagttgtgcttctgatctctcgtcccagtcctgcccacttaagactgtggacttcttaaaaaatgatggaatttgctaatcctaggataaaataatgtgtgtaaatcagaactggtgtagtggctcacgcctgtaatcccaacactttgggaggtcgaggcaggaagattgcttcagcccaggagtttgagaccagcctgggcaaaacagtgagaccttatctctaccttttttttttttttttttttgcgacggagacttgctctgtcgcccaagctggagtgcagtggcacgatcttggctcactgcaacctctgcctcctgggttcaagcaattttcctgcctcagcctcctgagtagctgggattataggtgtgcgccaccttgtccggttaatttttttgtattttgagcagagacggggtttcaccatgttggccaggctggtctcgaactcccgacctcaagtgatccacccaccttggccttccaaaatgctgggattacaggcgtgagccactgtgcccagccactttttttcttttttaatagaaaaacaaaacaaaaaaatgtgtaaatcacacaacaaagcacctaggacagaagcacttaatacaactgtgtctgccagacagaaaaagcgttgcctgtaaagaaaggtgtgcatctatacacatgcaatgaccctgtgaatttccttctttagttcgctacctcatttgtagacaggagcaatgccaggcctgcctccctcacagggttgtggtatggtttcacatcaattaagagaggatggacaattattacagttcctgaaaggactcccctatctctattcttgctccccacagtccattttccacacaacagccacagtgatcttttaaaattgcaaaccagatcataacactttctggcttaaaactctacaatgtctttgtattgcacctaaaaataaaggccaacttctctatcacggccaataaggccctgcatgacctgaaactggctggttctctgatctcatccctctagcctccttttaaatcttcaagacatctgactctgtatgtggtagtttaatgtatgaatgagtctccccaccatcctctacccgcaagctctccatttctcccttctcagtgtaacttggtggctcaatctgccacagggcccatgcacttaaagtgcacttcccccagaacttcacataatcattcaagtcggtttcaatatcctgcacttttcctaggcccctatctaaaacagctcctcctcaatcctagtcacaatgtactattgtaactaggaccgtactgttacatcatcttcatagctcttttcatcctttgaaaaataatttattttttaattttttattgacgaggtcatgccctgtcggccatgctgggtgcagtactgccataatagctcactgaagcctcgaattcctgggctcaagtgattctcccgcctcagcctcccgcgtagctgggaccacagacacgcgctaccacgcccggctaatatttcattttttttgtagagatggggtctggctgtgttgcccaggcaggtctcgaactcccggcttcaagcgattctccctcctcggcctcccaaagtgctgggattacaggcctaatccaccggggtgcgacccggccgaaattatttttatttattgtcatctgtttcacccagtagactgtaacctccactaaggcccctgtctgtcacgatctctgctaaaatccagaaaataatgcctgtacacaggaggcgatccaaaactatttactgaatgaatgactgaatgccttggctactcctctaaagaccaaacggattctatccagcccaaaagacacattccatctggccagtcgtagccggaccgagacagccgagccccggagtcgaagtcccgccctgcagggtcctcaccgtctgaaaccatggctgtcccagcacctcagcgcagagcaagtggtggtcaggggagcgtctcaaatcctgcgcagcccaacgtccggcgccgccaagtgacgcacgaggtgctgtgactcgtgccagccccctaatctgcggaagtggagtgcggggagtgcgccggaasaggggtacggaagtgcgccggaagtggggtgcggaggtgtgcagcgcgctgtcagactggctcgcaggcggcgcggccggcggacccgttcgagacagcgcgggcggctcgggtcccctggggctccgcagcaggaggacgccatggacgacaagggtaaatcaagacaggccagggctgctaggctacagcagcgccgttcaggggtccccccaacctctcacatccaggctgagctcccgaagagatttcttttgaatttcaggctgctccgctggttgtgtttccagagtcacaactaaatccctcgcgctgctcttgttttcagggatgcgccctggcagtatctgcaggcatccctcccacacatacgctccttcccagtgccagtctccttcctgccttgttggatctgtcattaaaattagaatgaataaggcatatttgatgtgctcatctagtatggttattaagtgaaaaacaagggcaaactaatacacttttcatgtaaagaaataaaggggagtgggtggaactccatgtataatatttgtaacatatatgtgtatgtgaatagacatgtattagcatagactgtctggaggggtgcaggagaaattggcaagatggttgactctgggatcctctcagattttaggaccaaagaggctgaagagagaatgacttttcatcatcatttactcgggcttaatttttaggccttgcacaccagtagcttttttttttttttttttgagacggagtctcgctctgtcacccaggctggagtgcagtggcgcagtctcggctcactgcaagctccgcctcccgggttcacgccattctcctgcctcagcctcccaagtagctgggactacaggcgcccgccactacgcccggctaattttttgtatttttagtagagacggggtttcaccgttttagccgggatggtctcgatctcctgacctcgtgatccgcccgcctcggmctcccaaagtgctgggattacaggcgtgagccaccgcgcccggccaccagtagctttttcaaaataaaaaagagctcttgcaaacagcaaagtggtattttctctattcccatcaacatttattgcatccctgaaaccaaataccctaaaaagaaagtattttttaaattgtttgcttcttaaagtcaacagtcattaacaagctctcttgccttataggctgctaaatgaattaggtgaatcacttttttccctttttccagagttaattgaatactttaagtctcagatgaaagaagatcctgacatggcctcagcagtggctgccatccggacgttgctggagttcttgaagagagataaaggtatatagagagtcatctgttaacactctgggacttaggatagtcttttttttcttttctttttttttttttttaaagagacggagcctcactctgtcacccaggctggagtgcagtggcgagatcttggctcactgcaacctccgcctcctgggttcaagcaattctcctgccttggcctcctgagtagctgggattataggtgtgcaccaccttgtccggctaatttttttgtattttagagacagggtttcaccatgttacccaggctggtctcgaactcctgagcttaggcaatctgcccgctttggcctcccaaagtgctaggattacaggtgtgagccactgtgcccggccgtttgttttttttgagacagagttttgctcttgtctcccaggctggagtgcaatggcacaatctcggctcactgcaacctctgcctctcaagttcaagcgattctcctgcctcagccttctgagtagctgggattacaggcatgcaccaccacgcctggcaaaatttttttttttttttttgagacggagtctcgctctgtcacccgggctggagtgcagtggtgccatcttggctcactgcaggctccgcttcccaggttcatgccattctcctgcctcagcctccaggtagctgggactacaggcgcccgccaccatgcctagctaattttttgtatttttagtagagacggggtttcactttgttagccagaatggtctcgatctcctgacctcgtgatccgcccatgtcggcctcccaaagtgctgggattgcaggcgtgagccaccgggcccggccaaatttttttatttttagtagagacagggtttcaccatgttggccacagtggtcttaaactcctagcctcaggtgatccgtccgcctcgccctcccaaagtgctgagattacaggcgtgagccaccatgttcggccaggaaagtcttctaatgactcttagaaatgtagaaagtgagagatgcatgtttgcctgcataaagtagtaatacagctccaagctcagcttctgccttcrtttcagacctttcaatctggagagagctcttacgttgtcatgaaaaggatccctttcataagtgaaacagactttgaatcgagagtgactatgttatattgtgttaaccatgatgcgtaaatttcagtagcagttcagctttataagtgtttattaggcctccaccttgtgccagattctgtacagatgctacagggaatattccagaataaattctggtattagtattatttattgtgatcccctaattcagcaccctaaatgtaagcatctgggtatagcatgaaatcttgtataagcaaaataataatgcagcctttaatctgaagggcttgcctagagacacatgtctttaaggcaacctccagtgtcttcccattgttcttaaaataacatccaaacaaccttagcctcacccataccaccttgcagacctcatctgccgctgctacttaatgtctttccatgcctcagcctcccaaagtgctgagattacaggcgtgagccaccatgcccagccacccagctttatttctatgtgtgcttgtttactatccgcttcctctattacaatcaaaactccatcacagcagaaccctacctgtcttgttcactgatgtatccctagcatctagaayagtgcctggtatatagtatgtacctagtaaatattcactgaatgaatgaatgaattgaagatacaggtcggggctgtggccctaatgtgaacatcacattccttgttggatcattccaggggagacaatccagggtctgagggcgaatctcaccagtgccatagaaaccctgtgtggtgtggactcctctgtggcagtgtcctctggcggggagctcttcctccgcttcatcagtcttgcctccctggaatactccgtaagtgcctgttctccctggggttacctttccacttctctgtttagtgacagacattctcagcattaactggatcttccctgtcccctcagtttgctcttttcttcctaggattactccaaatgtaaaaagatcatgattgagmggggagaactttttctcaggagaatatcactgtcaagaaacaaaattgcagatctgtgccatactttcatcaaagatggagcggtgagtggataatcatcatggtggtaaggaggagcaacggtttcgagtccgactgcctggggtaaaatccgggctctgccactcacttgctgtggagacttgaacaagtaacttaacctgtctgtgcagctttctcatctgttaaataaggatgacaatagtayctacctccttgggttgttgtgaggattaaatgaggcaagacatgtaaggggcaaggggtgtgagggcttggtattgtgcctggcacttagtaagtgctgcatgaatgtaggtcttgttattagagatggttgtcattgtaaacaggcagagagggacagtgggacagcacgtgtgattcttgatttattttatttatttatttatttattttgagacggagtcttgctctgtcacccaggctggagtgcagtggcgcgatctcagctcactgcaagctccgcctcctgggttcacaccattctcctgcctcagcctcccgagtagctgggactacaggtgcccaccagcaagcccagctaattttttttatttttagtagagacggggtttcactgtgttagccaggatggtctcgatctcctgaccttgtgatccacccgcttcggcctcccaaagtgctgggattacaggcgtgagccaccgcacctggccctgattcttgatttaatacagtgttttactaaagaagtatttttatgattgtatgtgtagtaaatctgaattaacagaacagctcttgtcactggttaacactgaggactttcttagtgaaggttagcaatagagggaaattgagggaaattttctttttaacttcattttagatgctattacagagatgtaaagccacgcagtgtttataagtgaggaaagacaggaggtgcaagttgaaccatcttccagtaaaggtgtaatgaaactatcataatgcccctcccaccagcatacgtccttttgccacctaggcctcccctgatcataaaatcatttacttgcattttgactcttaaatcttgtcctccattttattagccccttcccaacctttgaagtatgttattaaataaatggcataatagatgtgagtgaaacttgtagaaaagccagttgcaaacgaagccttttttgggcaagtggaggcaaggttgtgacttcctctcgctggggccttctccttccacagacctgctgtgccgtcagtattgtgcgggtttcgtttgctctagtgtagtgtggtatgtatgtactttacctgcagtcacctactcaggactgatttagacaaaatttatagcagagctgctcagatttgcacatgcagaggagtcagctggggtcttattaaatgcagatcgggattcagtgggtttgggctagggtccacgaacctsccttcctaacgggttctcaggtgagacccagaaaggagctagagagctggttctgcccccttgtcttattctgtcttctgcactcttccatagaaaagaggttatggaggctgggcatggtggctcatgcctgtaatcccagcactttggaaagccaagacacgcagattgcttgagtccaggagttcaagaccagcccgggcaacatggcaaaacttcatctctactaaaaatacaaaaagttagccaggcgtggtggcacactcctgtggtcccagctacttgggaggctcaggtgggagaatcacctgaacccaggaagttgaggctgcagtgagctgagatcataccactgcacttcagcctgggcaattggagtgagatcctgtctcaccaaaaaaaaaaaaaaaaaaaaaaaaagaggttatgggcctactgtggtggcttatgtgtataatcctagccggaggttcccttgaggccaggaattcaacactagcctgagcaacatagggagagaggccctgtctctacaaaaaataaaataaattagctagtcacagtggcgcacatctgtagtcccagctactggggtggctgaggtgggaggatcgtttgagcccaggatgtcgaggctacagtgagccatgaacactgcactgcactccagcctaggcatcagagcaagaccttggctcaagaaagaaaagaaaacagattatgtctaagtgtctacacattgcatccacgccacagataggttgtgattaccccaaacagtgtttataaattcaaaaaaattagttagccatcatttcaaaattggatttttgaaacatcacctggtctggcaatcttggggccacatgacgccagctggggctgaggagtcctggccctccttagccttttctttttgagacagagtctcactctcttgcccagactagagtgcactggcatgattatggctcactgcagcctcaacctcccaggctcaagtgatcctcccacctcggcctcccaagtagctgggactataggcacatgccactgcatccagctaattttttttgttgttattttttgtagagatgaggtcttgccaagttgcccagactggttttgaactcctgggctcaggcagtcctctcaccttggcctcccaaaatgctgggattacaggcgtgagccaccacacccagccttctgtagcctttcgctttgctgctggccccacccaacctgctgcagtgacttctgctacctacttggttcctgtaggcctgcgtgtgcaaaccatgtcttagaaataggaaraccaacccaagggaacctcatggagccttcagctatccaggcttttgtatcctttgggtaacactgtgtgggagttccatttctgcacctgctacaggatgtgagacctggcagaaacttttttagcttgcacatgggatggaaactgtaccatcaggtctcctttctggttgtggttgatttgtgagaaagtgtacagagatgcttagggtgtcgggaacacgtgccgcagtgcagagggtgtgagtgagcagcaaggagcctgcccctttgacaaagctttctcggtccacagacaatattgactcacgcctactccagagtggtcctgagagtcctggaagcagccgtggcggccaagaagcgatttagtgtatacgtcacagagtcacagcctgatttgtcagggcaagtacctttctgttcagttatgtgcccagccataattttacagagcaaactgcggattacagtccaacaggatcagaaccagaatgtgcccccagcttgccagcagtcagcactgcctttcattgtaccttttcctgcctttggaagaaaaatcactgaatttgcagcaggccgcagtatatgatctaggggtttcacttaagtagttaactccgtggaagagcagagattgtattgatgaagatttttatcaaggaataggtaacttatatctccctctctctagacgataatcaaagcaaaacttcctccttttttcctgaatttacatctcttacccagagtctaagagtatagttttccaaaaatacttctttctaaagaactcaaattcttgtttccttagtccaaagtattgggatctgccccttaacccattagtattaatgtgagtttcaagcaaacatccactgtccacattaggtgacatacatcactgtggtactgtcttgtactttctctaacgttctcaaaatgtcatcttcagtaagaaaatggccaaagccctctgccacctcaacgtccctgtcactgtggtgctagatgctgctgtcgggtgagtgcccatcttccccagccataatcacctccccmaccccatgctggcttacagcaagttttcagattgaaagtttgagtcccgttcataaagccacaccaggtagcgtcctacttcttaattaatagctgccctaaaccagcaagcttgttatgaggttgtgatagcatacaaagaagacagagctgtaggatgttggggagagtgggagttgtgtctatagctttatggctgtaagtgttgagtttgttgttgttgttgtttttgtttgtttgttttttgtttttttgagayggagtcttgccctgttgcccaggctggagtgcaatggcatgatcttggttcactgcaatctccacctcccaggttcaagcgattctcctgcctcagcctcctaagtagctgggattaccggcgcatgccaccatgccacgttaattcttttatatttttagtagagatggggtttcaccatgttggccaggctggtctcgaactcctgaactcaggtgatctgcccgccttggcctcccaaagtgctgggattacaggcgtgagccaccacgcccagccagtgcaaatgcattttaagagcaaagtacaaaggtcagttgggatcagcagagggtaatcagggctctgtatttctgtgaagacctggctgtcctcagtggcatactgggatgctttgtctcacctagaagatgcagcttgtgtcgcaaagccaagtcacatgttcctgggattgtcagtgtatttcccaagaaaaaacaagagtagtgatctcttggaatgaaaacaagatagrtgattaaggaaattaggaatgtgttcaaaagtaaggatwttgaggaattctactaattgctcattttaaagactaaattggccttcatcctaccagaaagattcttaaggttgggcacagtggctcatacctgaggcaggtggrtcgctagagttcaggagttggagaccagyctgggcaatatggcgaaaccccatctctagggcatggtggcatrtgctgtggtcccagctrcctgggaggctgarrtgggaggatcgcttgagcctrrgaggtrgaggtttgggctgagatcatgccactgcactctagcctgggcaacagagtgagatctggtctcaaaaaaaaaaagaaagatttttaaaactgcataacacttttgtccaacttcagatctcatcagattttaaaattttgtttggtttgtgctgaagtagaaaagaaagtagaggataccacacttggaaggaagactgctgtgtcaggacattcttgcttcacttacacacatatgtacgtgtgcatgcgccgggcggcagtgtgaagtgtatgtctcattgtagggtcatgaccagaaaacacccctggtaacaatgccaggggtctatcgcgtgttaagtgcgctttaaaaaaaacaggtagttatgggaggaacttaccttgatagaaatggaatattgatctttgcagatgatgatgctactcgttagagccaagaaaataaagcatgaaaagctttttttccccttagctacatcatggagaaagcagatcttgtcatagttggtgctgaaggagttgttgaaaacggaggaattattwacaaggtaagagcatcagttctccccagttccctgctcaagacttggaggtgtcttgctgacctaggacaccacagcagtgttgattatggttccttctaatcctgcttcacttcaggacttcatcatggtattgagttgttgcccatttcccgtaagtcatagcaatgggcagtccagtttcagtcaaatcttttttagattgatctacataaatgaagacaatgtaatttggtcaggtgtgatgccttatacctgtaatcctagcaatttgagaggccagggtgggaggatcacttgaggccttgagttcaagaccagcctgggcaacatagtgaaaccctgtctctacaaaaaattagaaaaattagctgggcgtggtggtgcttgcctgtagttccagctgcccaggaagctgaggcaggagtatcacgtgagcccaggaatttgaggttgcagtaagttatgatcacactactgcattccagcctgggcgatggtgagaccctgtctcagtaaaaaaaaaaaaaaaaaaagtgtaatttatatttatacaaaattggcttgaattggaattggggtttgtctggtttttgctttatttatgtgtatatgtatgttttatttatgcatatatatayacacacataatatatatacacaaatatttttaaaatattatttatatatttacatataaagtatgtatgtataaaataygtgtatttatatataaatattatatatattttaaaatagagacacattcactctgttgcccaggctgtagtgtagtacagtgatcatagcttactgcagtcttgaactcctagcctgaagcaatctttccacttcccaaagtgctaggattacaggcatgagccactgtggccggcctgtcatttgttttcattttaattgagcacatttgacctcaatttattacaatctctctctccattatttaatttagaaaagcttcatgaaagctttttttagttaaaatatatgtaacataaggccgggcgtagtagctcacgcctrtaatcccagcactttgggaggctgaggcaggtagatcatctgaggtcaggagttcgagaccagcctggccaacatggtgaaaccccatatctactaaaaatacaaaaaattagctgggcatggtggcgggtgcctgtaatcccagctacttggcaggctgacgcaggagaatcgcttgaacctgggaggcggaggtctgcaggcagagtgttgagtcacatggtaactatatatttaactttcagaaactaatgattttccacagcagctgcactactttacattcccactagcaaagcacaaaggttccaatttctctacatccttgccaacacttgtttttttaaatttttttattttttgagatggagtttcactcttgctgtccaggctggagtgcaatggcacagtcttggctcactgcaacctccagtgcccgggttcaagcgagtctcctgcttcagcctccctagtagctgggattacaggcaccccccatcccaccatgcccagctaattttttgtatttttagtagagatggggtttccctatattggccagctggtctcaaactcctgacctcaggtgatccacccacctcggcctcccaaagtgctgggattacaggcgtgagccaccacatccagcctctagtggctgtttctatatcctttgagaaacatttatttttttgattccaaagtcagaattagatatatctaatatatgtattagatatatgtatatctatattatatacataactttctattgctgttttttaattgttcctttattgtaattgagacgaggtctcaccgtgttgcctaggctggtcccaaactcatgggttcaggtgatccacccacctcggcctcccaaaatgctggaatacaggcatgcaccactgtgcccggcccgcttttctgtggcttctacttcagatgcactctagagctcatccattccattttctgccttcccagattggaaccaaccagatggctgtgtgtgccaaagcacagaacaaacctttctatgtggttgcagaaagtttcaagtttgtccggctctttccactaaaccagcaagacgtcccagataagtttaaggcaagagttttacatatttgaaggggtactaaagtctaaacagaaacctttggaaattgtagtcctaagaatgttccagtaattttttcacttcctattgctactttccccaacacttggaatacaaagataaattggtgattggactcacacatttgtccctagaayttcagtctttcagtctctttaagtagcaccatagatgggtggagaggaagcccgaagctggtgggtaagtcccagctttgggcttaactgagctcagctcccatcaccacaacttacaaactgtgcgagttgaggcaagtcctttcatttcaacctctgaaccggttttcttgtctgtaaaatggcatagcagtatctgacagggtcatgaggattctaagataatcttagcacagtccctggcacgctgcaagctctctattgtgactctcgatcttcccttgagaggtctggagaagttaatccggcatgagaatgaggggacatgggatttaagtttgttacactacagctctcagccagcacactgccatgatctggctcatggccacaactctgccctcgtctctagtgtcctgcatagcttagtttctcccattttcagagagcagtctcaggaagtagcacactgatcactcacaccaaggccctaccaggtcagagcactaaatattcagtgccgactaatgtgtacttctctcctcagtataaggcagacactctcaaggtcgcgcagactggacaagacctcaaagaggagcatccgtgggtcgactacactgccccttccttaatcactctgctgtttacagacctgggcgtgctgacaccctcagcagtcagcgatgagctcatcaagctctatctgtaacctgtgagccctttcctgccaaggtgcagcttacgtagttgaggcagggtgagtagctgcttgacaccccagtgagtcaggccaaaactgagatgtgtttaatgaagatttatggagtaaggacttaaaatcatacatcttggagaacctttcttactcatttcagtcccatctaaaaatgtgtcagctattctaaatcccaacttaaattgttcttacggtttctagaaactttccttttcagtttccagaaatacaagttagataattggctacttaactgatgaaagatgagcccaagtccacctgtcttcatcctcccctgcactccagactgatctrcctaaagcacgcragatgcaggcgaaaagcagccayacccctctgccacaaaygaccaacagctggtcaggacgttacacgcggtgccttgtaagaggcaagaaacacttgccgaatctgcrtctggcttccagtggtaagcacattcctcagcaggatcaagccaaacagtaaaaactaccaagagaacacgaggaaggcagaaacgatgtttagcaacagtattctgcatggttcactgcttaagaaaatgccttctggaatatttgtaaactgaaattctgtatgtgtaagagatgtttaaatatgtttgggtcctaaayagctttttaaaattatacttgggaataaattcagcatcttttcaaataaactctatgaaagacgctgatgtggtgttgcatcaatactgcaagctgaccaggccatctaggggaaaacactgtccagctacatttacacacttaagacccaggcaatcaggacaccatttattcaacaggaggcataaaaactataattctctttcccggaatatgacttaatccctctgtttttcagctattcaccaataaaacaatactgtgactattaacacagaaaaaccccagcacattagccacccctgcaggrcatcaaaggataactgaagcccagggccaagcacattcaggaggtcaaatgcctgaagatactgaggaatggttttgaaaatcagaagtcaagaagacttcwgtatctttatgtttaaaaataactataaaatagcctcagaaaaaagagcttatatatatatatatatatatatatatatatatatatatatatatataatatgtacatatgtctatatgtgacccatcatgataaatactgacatctattatttacactcaaataattttacattttcttctgttagactactccaagactggaattgttttgttttgttgtttttaatgagagggtctcgctgtgttcccaggctggtcttgaactcctgggctcaagtgatcctcctgcctcagcctcccaaagtgctgggattataggcaggagccaccgcacccggccaagactggaatgtttttagtaaaatattctgaagtgtgaaatccttcatttctccctcatctgaaaggacagctttcagagacatcattcttttcagatgtctcctgaagttgtgattttcgttaaaagcaaactggagccatccaccaagttagggaacagctatgtccttgtgggttcatctgtggcactggaatyagcagtcatcttccaaatctgagatccctaaatccactgtcttgattgttcttttgccagttgtcaacaagcccttctcaaattcttcttcagttattttgcctttcttaagttttttcaagagtcttgtgtcattaagaagttcttccatgtcctcatcttcaatatcagaaccctaagtgcagaagaaaccaataaactactaaatttttcagcaatagtgttgtagtgaaaccagcagttttaactcaagaactataagctctcagattggcttctgcaaatagagcaaattccccaccctggtcgccaacgtaacagaaatctgacagccccacacaattcctatttaaagaactactacaataaatttgttcaagattctaagttaatgtaagtaaaagtaaactttacctcttcccttttccttttctcattcatttttttcttcttttcttttttggccttctgctttgaccaagctttattttttatgaattttcttctcccttcattttctgttttctctcttctttgttgctccaggagtttctgcctctgcttttctctgattttatctttaaatggaatcgtgtcggtattaacgtccacgggcacaaaatctggaaactgcttycctctcaattctggcatcttgggcatcctcagcagggcaaaacctcgagcaaggctggcaaaatcaagatctgattcaatcagaagatcagagttagcgcactcaacaggattagaacaatcagtaatggcttacaatataatttttttctaaccaaagggtttaatgcattcattttagttagaatgaaaataattgaggccgggtgcagtggctcacgcctgtaatcccagcactttgcgaggccgaggtgggcggatcacgaggtcaggagatcgagaccatcctggctaacacggtgaaaccccgtctctactaaaaaatacaaaaaattagctgggcgtggtggcgggcgcctgtagtcccagctactcgggaggctgagacaggagaatggcgtgaacctgggaggcagagcttacagtgagccgagatcgcgccactgcgctccaggctgggtgacaaagcgcgactctgtctcaaaaattaaaaaaattacatttttacaaagttaaaaggaatactcagcagccagtggccagtttattctgtgtctactcaaaacctgggaacacttccttttatgagacaaagcaatctcatacttgtaagaccaccacatagttaagatggagacattatcacatgaagaagtccaacttaccctttaatctgaaaatcaggttgcattcatgctttgcataagcttggacatatgacacaaaagctttcatgcccttttcaaacacagctctgtcagccagggccatggacttgagttttggcagaaggtccgctgtgtttctctggggcttcatctcctgcagggggcactacacacacacacataccacattctcaccttccctggctggcatcatatccccagggctccccatcacaaccaagaaaaacaaaagcgaaacaattccttttcaactgttgaggtctgaagcccaactccaacccaaatatttcacatgctctgtaaagtatgttaaatttttaaaagaaaatttaaaaatcagatttcacatgacaatcctaatctggtagcaaagtatggcaacactgggtctctattcacaagaagtaacccttgcctgggtcccagcagggcatgctaccacacaggagacttggtcactccatgaccgaggtgcctccacagccttaaagcccaccagggtggccgggcacggtggctcacgcctgtcatcccagcactttgggaggccgaggtgggcggatcacctgaggtcgggagttcaagaccagcctgaccaacatggagaaaccccatctctactaaaaatacaaaattagctggggtggcgcatgcctgtaatcccagctacttgggaggctgaggcaggagaatccattgaacccgggaggtggaggttgcggtgaaccgagatagtgccattgcactccagcctgggcaacaagagtgaaactccgtctcaaaaaaaaaaaaaaaaaaccccaccagggccccccactgccaccaccagcccagccccagtgagtttgcaattcgtaatttcaattgctgaccacatgctggagaacttttccagctaccccgtcactaggcattctatctgaaaacggacggcagcttactttttggttaattgcaaggaaattgatgtatgactcttccatgggcaggaggaacaccagagcgctgcccccgtggccaatgcgagctgtgcgaccgcagcgatgcacgaaggcactgtgagaacacagggtggaaatgggtacccaggtgatgacagctgaacagagctcaggctccagccacatggctgctgcagctaaaacgctctggggagcctctagcctccacagctcagtgtggactcggccacttactagtgtgagaaatagaactggcaattaaaccaacactgcaaacagatacgattctgtaagaaacatttaatgtgaactcttaagtaaaacttgtatctttctctctgatcatacaggtgggacatagtccccagtggaaaatctgggaaacaatgaaaaatacaaagaataaaatgaaaatgaccaataacctcaggagtaatcatcaacacttgggggtttataggcattttcctatgcgtggaagcatgtattaggaatatatgctgactttgaagaaagtaattgtaattttcacatgtggtgktatgtattgcttttttcatttagacattctattgtgtgtttctgcaagaactgataatatttgaaagtacttttaattgctaccaatacagtatcacgatttcaccatgaatgggttattcatccatttgcctatttttgctacttaaaacaacgggtttttgttttgagacagagtctcacactgttgcccaggctggagtgaagtggcacaatccattgccacctctgcctcctgcgctcaagcgattctcctgcctcagcctctcaagtagctgggactacaggaacacacgcctggctaatctgtatatatattttttgtagagacagggttttgtcctgttgcccaagctggtgaattcctgggctcaaacgattcacctgcctcggcctccccaaagtgctggaattacaggcgtgagccaccgcgcccagcctcaaataatgttgttgttttttgttttctctcattgtctgaaatttctataaccttgctctacatggagcagggcaaggcctcaaaccatttcaaaactgttctggcaagccctgtaggaatccacggggtcactgcagacccaagcacgctggaggcttgctataaaatgtttcagtgaacatcattatctgtttatcttcttcgggattcctcctttattaggctaaattcctcaacagagagtgggtggcagcctcgtaccataccttgcattgctgggagggtcatactgcaaaacccagttgacttcaggaatatcaattccccgggccatcacatcagtgcacactaaaatcccactaggaaatgagaaaaaagcattctgagtaaggaggccaccatcttcatcaccatcaaacagcctactgatctcgatgacagtgacacacaggtgctggagcttctcacagaagcaaatgtttaaggtaatattttgattttttcttctttctacaaatctctgggacttcataaattccaataaaaattggagggaggtgagagacagcaaagggattttaaaaattacagcactgccatttgaaaaccaaaactgtatgggtctaatcctttgtagccatctgaaaaacaacggacaattcactccataactgaggcctagcagtcaggtatatcactttgtccaaaagaagacttttaatatagtcagatgttcaatgattaagaaaaacagaaaactattatttgtcagcacaagcagatacaagttatggtcattggtagacacaagttgcctgctgtatagtcacaagcctaataagccacagacagttttttgtttttttgtttctttgtttgtttgtttttgagatggagtctcactctgtcacccaggctggagtgcactggcgcagtctcggctcactgcaagctccgcctcctgggttcacaccattctcctgcctcagcctctggagtagctgggactacaggcgccagccaccatgcccgactaattttttgtttttagtagagacagggtttcaccacgttagccaggatggtcttgatctcctgacctcgtgatccacccgcctcggcctcccaaagtgctgggattacaggcgtgagccaccgtgtccggccttaagccacagacagtttctacccagacaggacaaatggatttgctccttgctgcttgacagtcatcacaacctttccctggaccgggcacagggcaatctgggagtgaagacaatacacaggactcctgtgtcacggagcctgctgtctagcacagaagttcagtaactagggaaatgacatagcaaaaggcaaagcaattggaacagggcaatggaggctcggggtgtttacagagatgtgataaccagattagagagggaagagggttccaggcaggaaagacaacacatgcggacagcacaggctactagagaatggggcatttggggacctgaaagagcagtgtggcaggagagctgctaccttcaatgaagcccacccacctttgcaatttgcggaactccatgaagatcttattgcgtttatatttcatctttccrtgaatgcacataatcttcacgcccttcaccagcacttccagagccttcccatagtattccacacaggcacaggtgctgcaagagggacagagggcttagagtsattggccactttggtccttctacaaccgggagaggggaacagtgagcaatagctgcagcagacgcaacctaactacaagccctccctaggggaatgacaaggaaaatggcagtggaaatcatccacaactgagttctcaatctgtaatcctctcagccaatgaaaggccaatcttttgacaaaatcccttaaacatgaattaaaacccccaaggacatattttactgtctaaagatgttctcacgggaaatctccctgaccccgagaaaggaattaaagtgaaacagtcattcagaacaaaagcaatgacatcttagccacaaatagtgttacaagatttaaaaacatttctgctttccgtttagggaactgcttctttcccaattagcaggattcccaagggctcagcaaataacccaagctaggccagtcagatcccttctcccagatatttgggacttggagctgagtcatccaaagacaaaaaggggttggcagtcatcccaataaagatatgccctaaagagatggcccatgaactcctgccagggagcctccttccctgggagctggacactcaacattctctgaatctgtgagctccttacccggcacccttctaataaagttcaccctggacccttttccttaactggaagcattcccaagtgacttcccatccttttgcagatgagggaactaaaacttaccagagacacagagtaagtggcagaaccagaacccaggtctaatgctcctcccactagaccagactactgcactactgcattccagtttgggctaactcttgtctacttcagtccctccacctgtgctgtgaccgctcttttccaccttgagtcacatagtatgtaatgaagtggtgtttcacacactaagcctcacaacccacagacctggtgggttctgaaatcaatttagtgggtctcgaccagcattttaaaaaaattaacagctggagtagaacagaatagaaaacatcccacctagcagggtgcagtttcatgaaaacctttgttttattgtcttgtttgggtgtgtaccaaattgtacttcttactgtgggtcatggtcaatattgcattttatttgtaggataacagatagaaaagaaattataaatataaatatataaataaatataaaattattttttatgtactactaaaga

SEQ ID NO: 93941 - DNA, 58484 bp, Homo sapiens
agccctcaataagtggctagctgctgcttttattattatattgtttgagaaaaacaggtgatgaacaaaggtacctttgatagcacctgtatacaatgcactggctggagaggagtgagactgacaacaagactggcagatgttgctgggcgacaggcccatgaggggttattaggagtttctcttctctttggatctgtctgtggaaatggtcaaagaccatggacaaatactgagaaaaaacagcccaggtagaatgcgaaacttcttaggagaacctcaggttatattgtgattgcatccgttacctgctgttcttggtggaatagaactgaatggtggctatgctgaccatgtgatctttccctcctaggttctcctcagtgaactggcagtaccagtgtgggcttacctgtgagcacaaggccgaccttctccctatcagtgcatccgtccagtttattaaaattcctgcacagttaccccaccccctgacaaggtactccagttgctcacctagttgacattaggaagcagaaaaatatatatttgaaaattggaagtttattcctttaatcaagttctgatacttctcacttgtagtttttgtaaccctctaaaatgttttctagattccagatcaattatacagagtatgactgcaacagaaatgaggtgtgttggccgcagcttctatatccatggactcagtattatcaaggtagggtgaaacagatttctatgaccaattatgttatgtcaatttaaaaaaattttttaaatgatgtctaaatgttacagaaagcataaaacatatagaaacttaaaaaaaagtacggataatattgccacttggaagtgatcaccattactgttttggcttagtttatttctacctacactgtttttttttttagagagtcttgctctgacaccctggctggagtgcagtggcacaatctcagctcactgcaaccattgcctcctgggttcagacaactctcgtgcctcagcctttggagtagctgggattacagcaccaatatgcctggctatttttgtatttttagtagagacggggtttcactgtgctggccaggctggtctcgaactggcctcaagtgatccgccctccttggcctcccaaagtgttaggattacaggagtgagccaccacacccagcctatacctacactgttatcaaaagagttaagaaatactgctgttgaattttgtccattgtttttcaggggagctgcattctcagtgtgttgctaagggcttactgttgctgttgttcctcacattggccttgttcctcagcaacccctggaccagaatatgcaaagcctatagttagacaaccacctggcttttatttttttgagatggagttttgctcttgttgcccaggctgaagtgatctcggctcaccacaacctcctcctcttgggttcaagcgattctcctgcctcagcctccggagaactgggattacaggcatgcaccaccacacccggctaattttgtatttttagtagagacagggttccaccgtattggccaggctgctctcgaactcctgacctcatgatccgcccatcttggcctcccaaagtgctgagattacaggcatgagccaccgcacccggcctttttttttttttttttttttttgaggcggggtcctctgtcacccaggctggagtgcagtgcacaatctcggctcactgcaatctctgcctcccaagcaatcctcccacctcagcctctggtgtagctgggaccacagatgctccaccatgcctggctgtatttttggtaaagatggggtttcgccttgttgcccagggtggtctgtaactcctgagctcagatgatctgcccacctcggcctcccaaagtgctgggatcacagacgtgagccactgcgtccggtccatctgacttctcaaagactttagaccttgacttcagtgatttgttgtagtcttgtatgcttctctataaaattttaataaatgaaatgtcttatttttgtagaaaatttttattaagtgccctgtgactttaattcatatatgtagctatccaatgcagaatgaatattctcatcgctggcctggactgagtaaaatgcatgagaagaactcaaaaatgttagaaattttagcttatcacaaattagttaaagtcataggagttttatttataccagagagaatcagtcttttctttagtttttaatacattcgtgttgattgatgtttcccatattccgtagaaaggattaagaaatccttaaaaatgcatgtaatacaaaaacacaaaatcactgatggggaaagatatgggggctgcgggaggaaaataataagagaaaagtaaaacaaaaccaggggcacatgtaagccctaaaatacatgccagaggttgcctttagcagaagcaggcccctaattcattatttatttatttgttttttggagacaggttctccctctgttgcccaggctggagtgcagtggcacgattatagctcactgtaaactcagacacctgggatcaagcgattctcccccaagtagctgggactacaggtggcacacagctaccacgcctggctattttttttttttttttttttttttttttagtagatgggggtctcgctatgttgcccagcctggtctcaaactcctggctttagcgatcctaccacctaagcctcccaaagtgctgggattaccagcaggagccactatgcccaaccaagaccccagtttacaaaaacccaagtatgattagctataggaattatgaaatctattcattaatacaggaattatgaaatctattcattaaaaattaactggttatcaatgaaggacagtttttcctagctgagtcttgacaaatttctcccatgggccgtcacatgggaacagtcaaccccactcagtggggagaatggattttttttttttttttttttttgagactcggtcttactctgttacccaggctggagagctggagagcagtggcacaattacggctcactgcagcctcgacctcctgagctcaagtgatcctcccaccttagcctcccaagtagctgggaccacaggcttgtacctggctagtttttgtattttttttttttgtagagaagggggtctccctatgttacccaggctggtctcgaactcttaggctcaagtgatctacctgccttagcctcccaaagtgctgggattataggtatgagctgctgtgcccagccctggaatagatgtttttagccacggtcctacagtggccacatggcacatcacctgtaagttttctttgtgtgccaggtaacttagttgtttcagatggattttctatgttatttaagcctaattttgaaaaataattattttcccttttatactttttgatcgaattcctagtgcctgctgatacccagcaccacataaaatgtgctgtttcatcttcgctgcagagttcctgcccaggggcaatttcgaattttcctccagtcttaagtccattttcttttttctttttttttttgagacggagtcttgctctattgcccaggctggagagcagtggcgtgatctttgctcactgcaagctccgcctcccgagttcacgccattctcctgcctcagcctcctgagtagctgggactacaggcacccaccaccatgcccagctaatttttcgtatttttagtagagacggagtttcactgtgttagccaggatggtctcgatctcctgacctcgtgatccgcccgcctcggcctcccaaagtgctgggattacaggcatgagccactgcgcccggcctgagtccactttcaaatagggggatgagctagtcactgcagaggtcctaagtttctgcatgatggaaataccgtgaatttcagcatctgtactgtggtggtgttgggccttcacccgacccctctagggctgactcaggaatctgggtcagtactggactgacggagctggggtctgagtcaattattgtctgaacttcagcctttgaattcaccttcacagttcttactgtatctttttgttgttgttgtttcttttgaaacagagtgtcactctgttgcccaggctagagtccagggatgccatttcagctcactgcaagctccacctcccaggttcaagcgattctcttgcctcagcctcccgagtagctgggactacaggtgcccaccaccacgcctagctaatttttatatttttttagtagagacggggttttgccatgttggccaggctggtctcaaactcctgacctcaagtgatccacctgcctcagcctcccaaagtgcagggattacaggagtgagccagggcacccagcctagtgtaactagctttggatttcaggtatttatggaaaataaatttaaaacttccaaatgacaggtaatttagcttgattttgtgggctttgtgaggacgccttttgtacttaaaagaaggaaaaaactcagtttggcagaatggggtctggagtgtctatggttttaacttttttaagtttatacatttatgtatgcattcatgaactatttattgagtggctactatgtgctggggcttggagataccacagtggcagaaacaatgtccccaccttggtggagcttccattctagcagggaagactggcactaacacacagacaagataatttcagatggtggcaggtgcagtgaaggaaatagaacaaggatgtgactccagggacagtctcaaggaaggggatatgtaagcagagactcgactgggacagcggtgaggttgcggcctggggcggggggccactgcttcccggtcagtgtggggaacacacactgggtgctgtgtgattccatcgacaggacaagcctggaggtggcaaatttagcgagacaaaattgtcctgtggtggccaggccgggcgggaaggggagactgcaactgagcaggaggagtcttgcgaggtcggtgggaaatgtttgaaaactggattgggatgctggctgcacactccaacttcacgaagaagcctaggatccctccgggcggcggatcacgcctgtaatcctagcgctttgggaggccaaggcgggaggattgcttgagttcaggagttcgagaccagcctggccaacatgatgaaaccccttctctataaacattttaaaaacaaattagccgggtgtgatggcgcgcgtctgtaatcccagctcctccagaggctgaggtgggaggatcgcttgagctcaggaggtcaaggttgcagcgagccgagctcgtgctactgcactcctccctgggccacagagggaaaccctatccataaaaaaccagcagcagggccgggcgcagtggttcacgcctgtaatcccagcactgcggaggccgaggcaggcggatcacctgagctctggagttttgagaccagcctggccaacatggtgaaaccccgtctctattaaaaatacaaaaaaattagctggacgcgggtggcgcgcgtctgtagtcacagcaactggggagtctgaggctggagaatcgcttgaacctgggagacggaggttgcagtgagccgagatcgcgctactgcactccagcctgtgggactgcgtgagattccgtttctctctctctctctctcacacacacacacacacacacacgcagcagcacagggtcgtgcactaggaacgggtgagcttcgcggcgtgcacactcggcgagactcctccaggaaagccggggagccgcgcgggatttagctctgcgtccagtccggcggagcgccagctgcagtggtcgtacccgccgggttcgcgctggttggccctgccgccacgtcgtgcggcgacaacctcgggcgtccattggtcggccggcggggggggcgggacgcgggggcggaaccggaaccggcagtggcttgggggcgggacctcgcggactgctgtggcggcagctggagcggcggccgcggtggcagaaccgggggcggccgctgcagtctggagccccatagtgcggggccgcggccaggccacaggaagagctcgaggcccgggccgcaccggctgagtgtgcgggcccgcgcggctcggagccgccgccgcccatcgagcccctccgggcgygggtcggcccgccatggggtccctgttccggagcgagaccatgtgcctggcgcagctcttcctgcagtcgggcacggcctacgagtgcctcagcgccctgggcgagaaaggcctggtccagttccgagacgtgagtgtcgcccgggagacgcgggccgcacctgctctcctggcgcccccaatcccgcgcatcgctggggccctcccgcggggagcaccgaggaagggcgcgccccgtccccattgtccagacggggaagatgacaccccagctcagcggccaaagcttcccggagcgcggggctgactccagggtcgccggccgtctgtgtggtcggcggctgctctgccccagttagttaggatcgcccgtgtggtcttcatcagctccgggcaccgagctcagcgggagaacaaatcccacaaaggcctcttggagtccttttggaactttacgggggttaggggggcgcattaaccaaataaataggtcaaccagaaaaggtttgccataaagaagaaacggggtgatgtgaaggtgattcgggcgggaggtgagtgtgaagggattgtcgaggaagcctcccggagaaggtgatatttcagctgagacccaaatagaaaggagccagccgtggggaagatctggggagagggtccttgttggagggaacaggaggagcccagacagagccagaaatgggaaggagctggatgtcatctgcttgaggagagggatttttgtgttttggtcactgatgcttaatgctgtacataccattgtgtgtaaggacttaagaactcagtcattgtttgtcgagtggaagctgtctccccaacaagtaataataaacatttgtttgtccatttacttgtttattgtttgtctccaccaaggactgtcaacctctgagagtaagtaccttaacgcagtccttggcagtcattggcatcgataggcatttgttgaatgaacagacaagcttttcttgactgcccgctatgttcaggcactgtttttggtgctggagactcggtggtgagcaaggcagacacagtccctgtgttcctggagcttccagtgtgggaggagacagattaaacacactctgattatgagctgtgataagtgctaagaaggcaaagaacagggtgtggaagggagaccgtgaagcaagtacttactgactgaattgaaatccactcaggcgaacattttatttcctggccaccactttcatctcctgactgtttcccttaatcttcctaaggtgtccttaatttcaaaagggatcagccctacccsagatctgatatccattgatatcagatatctaataccagatcagccccataaggcagttgcaaagtcatggagagactcctgagtgacaggcgagggtgcaggtaagatgcagggcggttcctggttcctggagccacttctgcagttgtacccattcacctgatggatgctgcgctgagctgtgaatagcacccaaaacattcaggcaacagctgcaggtgcagcaggctcctacatttgtaacaggtagatgttttccttccggttagtactcaagccaagacacttatcacacttcagtcttacaggtttsagyaaacgtactaatcactatgaaggttccagtttcaataagcgccactacctccagtcatagagtgtacctgggatccttttcaactgaatgtcagtgaaaggagaagaaagtgctgttcatctttttccagaaggaagtaaaactaaggttgctgcgatgagctcttgtgtggtgctaggttttcagtgtgtcttcagcctgagtttcctactgactttgtggtgaccagatgggatcactgttagtaacccttgcaagggaaaggggggcaggtggtgacttccgtggtgacagctagtgggaagtacctggaaaagaaaggtcattcagctgatggggaggactccctgaagggaaagttcgcacttttgttacagttctcagtctaagaacaggtttcctctttagtccttcagctgaagtgggagtatcaatggctgtgaatatcaaaacaaacagcaccagatctcctctgccggttttactaggttaaatgtgccttgaattgaatctacattaaaatgtaccttattccattagccttgaattagggtgctgccctaaaagggaaaaaaaacccaaaatttataaaagaaaccacacaatagaaaaaaaaagttaatatgtctgggcacggtggttcacgtctgtaatcccagcactttcggaggccaaggcgggcagatcacaaggccaagagttcgagaccatcctggccaacatggtgaaaccctgtctctactaaaaatacaaaaattagctgggcatggcggggtgtgcctgtagtcctagctactctcagaaggctgaggcaggagaatcacttgaacccaggaggcagaggttgcagtgagctgagatcgcgccactgcactccagcctggcaacagagcgagactccgtctcaaaaaaaagttaatatatgtaagctggtgatggtggtgtatgtatgtgaaatccatgtttgtattattgccacagaaatttacctctttataaataaagattctactatttgtagaaacatcatgcccatttagagttaagtactatttgatattgaaggaagaaaatgaaagctgagaagtagtatcctgtgacagctttagacacagaacttcctttccaacaagttccatagaactagattgtgtctgaatcattagtaacttggaagtggttacttttagttcgacctccagaaatgaatgagaaggtgacaaacagaagtgaaatgagaatttttaccttttttctggttcttttaaaaaaaaagtccccaaaaaatgaacaagaactgagtcagacactgagtagacacttaccaggttgagcagtttcatgtcaagttgtatcttaactgtttcttgagagtgcccagtacaaatcctggatggaataaagataaatttcgtgtcttaaatggctttcaacatgaatgatatactgtaaattgttgaagtatgaaagtgatagatgaccattgtgagaaatgtggaaaacataagaatagtaacataccttgcatgatcccaacgcctagaaattaactttaactttttggctaatactggacaatcagcatttctctaataatgtttaaaaatgtccatatatatgtatttttatataatttgaaccacactgaaaacatcctaatctgctttacacagaaatcatgactaacttcctaattttattaaatattcttttacaactttttaaaattgttttaaactttatattataagtagagggaagagtacagtgtacccccatgtacccataaatgtaaacttagttttttctcacttcccagactagatcattttgaagcaaatccaagatatataatttaacttttcaacaagtacctctaaaagatgaattttttttcttttttttttttgagatggagtctcaattctgtcgcccaggatggagtgcagtggcgcgatctcagctcattgcaacctctgcctcccaggttcaagtgattctcatgcctcagcctcctgagcagctgagatcacaggcgcgcgccaccacgcctggctaatttttgtatttttagtagagacggggtttcaccatgttggccaggctggtctccaactcctgacctcaagtcatccccccaccttggccccccagagtgctgggattacaagcatgagccaccaggcctggcctagaagataaaaaattattaccaacattgtacctgaaaatttaaataacatttcttaatataatcaaatacctggtcatttttacacaactttattgaggtgtatggtagagtttacccatgatttttagaaagtttatggaggccgggtgcagtggctcacacctgtaatccyggcactttgggaggctgaggcagccasatcacttgagcccaccagtttgagaccagcctgaacaacatggcgaaaccccatctctacccaaaatacaaaaattagccgggtgtggtggcacgtgcctttaatcccagctactcaggaggctgaggcaggaggatcgcttgaacctgggaggcagaggttgcagtgagctgagattgygccactggacttcagcctaggcgacagtgagatcctgtctcaaaaaaaaaaaaaaagagtttatagagtcatgcatccattgccacaattgttttagaacattccatcaccccagaagattcttaatgctcatttacagttaatccttattcctacccccacccccccagcacccactaatctgcttgctgcctctagggttgtctggacattccatgtaagtggaatcgcacagtatgtggcttcttgtgtctggctgctttcacttagtatgaaagtcatccagggtgggcgtggtggctcacgcctgtaatcctagcattttgggaggccgaggtgggcgaatcatctgaggtcaggagtttgagaccagcctggccaacatggtgaaaccccatctctactaaaaatacaaaaattagccgggggtggtggcacttggctgtaatcccagctactcgggaggctgaggcaggagaatcgcttgaacctggaaggcgaaggttgcagtgagccaagatactgccagtacgttccagcctgggcaacagagcgaaactctgtctcaaaaaaaaaaaaaaaaaaaaaagagaaagtcatccctgttgttgcatgggtcagtagttcattcctttttattgctaagtagcattccattgtgtggatatagactgtaatttcttttcttttctttctttcttttttttttttttttgagacaggctcttgctttgtcacccaggctagagtgcagtggtgtgatcactgctcactgcaatctcgatctcctgggctcaagcaatcctcctgccacagccttctgagcaactgggaccacaggcgtgcaccaccaggcctggctaattttttattttttggagagatggtgtcttaccatgttgcccaggctggcctcaaactactggcctcaggtagtcctcccacctyagcctcccaaattgctgggattatcaacacgagctgctgtgcctggctataatttctttaactacgctactgtaatttcttgaactagttttctattgttggatttttgggttatcattttttctttttccctgagattgatgttgtcatagattttcatctgtttccatagctttttccttaggttaaattttcttcatggggtattgctgggcaaataatcattttcaggattttttctttttttgacccagggtctcactgtgtcacctgggctggattgcagtggtgtgatctcagctccatccaacctctgcctctcgggctcaagcaattctcgtgcctcagccttccaagtagctggaattacttaggtgcgccaccatgcctggctaatttttttttttttttgagatagtgtcttgccctgttgcccaggttggagtgcaaatggcacgatcttggctcactgcaacctccgcctcctgggttcaagcaatttttccacctcagcctcccgagtagctgggattacaggtacttgccatcatgcttggctaatttttgtgttttcgtagaggtgggatttcaccatgttggccaggctggtcttgaactcccgacctcaagtgatctgcccgcctcatcctcccaaagtgctgggattacaggcgtgagctaccgccccggcctaatttttgtatttttagcagggttggggtttcaccgtgttggcccggctggattttcaggcttttttggtaacagttgacaaattgctctcaagaaaagttgtgtcagtttatagtttcattcaatagtatacaagagtgtacatcccccaaactttggtgatgttttattttttacataaaagtatttttaaattttagaaatttaaaccatatttttcatccttttctcagctcaaccagaacgtaagttctttccaaagaaaatttgttggtgaggtgaagaggtgtgaagagctagagcgaatattgggtaagtttattttctgatttaacaacttaaataattacctttatataggcaaaccttgttcggtttaaaaatattggaaaatatagacaagcagaaaggaaaaaaagaaattgtattctcattcagaagtaatcacagttatgtaggcatgtattatttttctgtatttttttattcatctataaaagtaaaaatttacaaacataatggcctggttattttgttgttacccttgttttttacttaacagtgcttactataacatcttttcgtgtcagtagacatagatatttacccatcatcgtttttgatggcagcatactatttgattgtattaatattaatgtgctgtggcttatttaaccgatcccttgtagtttattataacttaaaaacattgtacttgttaataagttacttaatttaaaattttttcaaggaacaagggaggcgggaaatggaagatagagtgattgacaataatttcctttttctcagggcttcctttgccagtgtgttagatcagtgctgattgttaaccatttcaactaagcagcccagggccacttcttttatctctaaaatctttaccatcttagtctggtactagtcattatcaaatcaagccttgacattctcactgaagtggagggaaaatgacagacagtcaactgaaggacaaagcttgtttttttttttttttgagatggagtcttgctttgtcacctaggctggagtgcagtggcatgatcttggctcactgcagactccgcctcctgggttccagcgattctcctgcttcagccgccctagtagctgggactataggtgcgtgccaccacacctggctaatttttgtacttttagtagagatggggttttaccatgttggccaggctggtcttgaackccttgttagggacaaaccgccccaaaaaagcttcttggtactgccaacacttcccccaaagctctccgtgctgcctacccctccccctgagcccctttaacatttctaagcccttatctaggtgccccagtgaagccagcaaacttcacttatcaggccttcctgcgataagcaaaacacaattataaaccatccggaccacacagggggaggttgtgggaagcctaaacaaactttgcctacagcctcctgtaagttccttcatttagctgctactgtaaaggtcacaaggtgatacatggcaaagttaaccaacaaacgaccccagggtctctctcccccgtataaacccctcattttgtaagttcagggctgcctcctctgtcgtggagcagccggcaggttcaataaacttactcacctgactttgggtctattcttcctttctctctgctgaccttacactcctgacctcaggtgatccactggcttcggcctcccaaaggtctgggattacagatgtgagccaccacacccggcctattttttttaaattggggatttttaagtgtaacaggaaattttagtcatttgaaatctagtcctattcatattgcttgaggtcctagttatttgtgtggttcatgtacgttagtggcaccatattcctgtctttgcaacctgggtgagtcattggatagatggtgtattcagaataaggtttttaaaggcagggcaaatgtgataacacattaggtatatccaggacttcctgtagcttaaactgtttcaaaagaatgcagggctgggyacgatggctcacgcctrtaattccagcactttgggaggcyaaggtgggaggatcacttgagtccaggagtttgagascagtctgggcaacatactgagaccctgtctccacaaaaaataaaattagccaggcatggtgacatgtgcctgtagtcttagctactcaggaggctgaggtgggagaattgcttgagcccaggagtttgaggttattgtgggccaggatgacacaccactgtactccagcctgggcagcagggtatgaccccataagaatgcagacttaaaacagtgaaaaaggacctctcaaggaaatttaggtgtacgccaggcatggtggtgcacatacctatagtctcagttactctgaaggtagaggcaggaggctttcttgagcccaggagttcaaggctagcgtgggcaacatagtgagacccctgtctcttaaaaaaaaaaagaataaattgaagtataaattggttaaaacaatttgcgttcatttctagaaacctcttagacccagtgcttcctttgctatcttggtaagacagtttcttttctttttctttttgtttttcctccttacttctttacctgcctctctccctctgtaaaccagttagtaacacttctaaatattaggcctgataatgactaacagatattgtgacttttagcctaaggaaagggatgcttcatggaatcgaaaacataaaccaaataaagtagttagttttggctggtgtactattagtttcatgaatctaggtgttttgttttgttttgttttgttttgttttaatgactgaaacaaaaaacatctaaaaccacagcttctggaagaaccacttgttcttgccagtcttgttccactctttgaacttgatcttggcctcccactgggccttgcatttaagagcagggtctctgaaaacctggtggttttgtctaaggggatggtcacagggtactctgtgggcatgaggtcattatagttataaaccttcacaaaagacttgacctttgacctcttggcaatcttcttgcccatggcagctgtcactgtgggaataatggtcttttttagccaccagagggtggctgcaggtgtggtctgaggtgccatcatcagttttcttcatgaggattggctttgtgtccagagtagtgtccggccacgactggcaccattttcccaggtttcatgaacttgcccatttctagggcygccctgacacttgccccccaggctgccgagggcagcaattgcaagacccagccaggcttctgaatctagtttttaacttcagtggtgaaacagtgcaggttgtcctcagccacagcctcagggctgactgggagctgcaagagagcctggctcttggtgctgggtgggtttcctggtagtggttgtgattttcttgttggactgatggatgcccttttctttctgagggcatctgcgagaaatcatgttgccagctcccataggggctattgtaggtctatcacttgggtaattcctgcacttccaagtgcgcccctaacctctgcttcattctgcccctgtagatggctgcgactcaaaagttctttcactagaatattagaaatgaaaaaaatgggtggaatttcagaaaaggtttatccaggttgttgttcattctatttatttattttttaagtcactaagaaatagaagaggttgttgtttattttgtcactgcatgcagatctctctaggcagcattatttttggaaacaaggttgcaaaaagtgaccagtaagtcagttgggacaagcaagatttttgtgcatttagacattgatttttagatggcttgggaaacattgggctttaaaatgtttctgactgaaatgtattatagtacattttagtatctaattgtttaacttttattttcacagtgtatttggtacaggaaattaatagagctgatattccccttcctgaaggagaggccagccctcctgcgccacccctgaaacaggttctagaaatgcaggtaacttgcttctgacgaagctggttgcagccattgatcttgggggctgcttacttacttatttcatgttgtctaatgcttttctgcctttcttctcaaaactatggaagatggtgatctctctaggcagagagattaaagaccgctattatgattaaccctcagtaatagattatctgtgttaaattttaacagtaattcagttttcttttayagygtaaggcatatgcttcctttccaggtggtggtgaacagaggcaacaagaatcaggccatcaagcctgattgatggatcagaacagttcatgatcctgtactgtttcagaaagctcatcccagggtcacccatgccttagctgcctcttcttgtgcaaggaattgaggcttcggtgktgtgccttcacagtcctcccacatttaccctggcccttcccctctaaattttggaagctggtatgcagtccatgggttgtctcgggtgggcagcaagcagcgttctgtcaccctgagttccctggctggtgtgctggggatacatgtgtccccggtgagaacactcacctgtgctgcttrttagcatcctcggtgaattcgttcctcaccctgtgaagtaggctggagctcttgataactcttctaaaacaattatcgttgtgtaactgaagccattcagttgcgggctcctctgtttgtttattcgggaggaagtctttcattacttggtgcaggagactccagagagaactctccaaccagatgagtaacagcagtcatctggattggcctgttcgatgggtcgcttgtgatgtaattacaaacatagtgatgactgtgtacagtgcttgtaaggcaaagcagaagtaatgaatatagtatattaagtgatttgtttgaatacaagttttcattgactcaatgatttgcyttacggatttttgcttctgttattttaatacttaagtatttttaaggatgtttagtatgtaactaattattaaagattctcatgaatttttttttttttttgagacagagtcttgctctgtcgcccaggctagagtgcrtgtagtggtgcgatctcggctcactgcagcctgtgcctcccgggttcaagcaattctcctgcctcagcctcccaagtagctgggattataggcacgtgccaccatgcctggctaatttttgtatttttagtagagatggggttttaccatcttggccaggctggtctcgaactcctgacctcgtgatccacccaccttggcttcccaaagtgctgggattacaggcgtgagccaccacgcctggccrattgtcatgaatttttatcctcaattaattgtgtaaatgtgagtgcatagtaactcatatgctagagactaggaaaataagttagaaaagattatctaaatatattctgtgttgcaaaaaaaggaaatgtagacttaaagaggaagagtctttgatgtgtgatatgaataagcagacaaaggaaatccgagaaatgacagcacctgtggttagagacgagggccagtcttgggggtctcacgctcatcacagccttcggaatgttttagctaatatgtggtgtgaacttcacagaaattacctgaattaatatgaaacaataaatgagcctatttatttatttactttgagaaggagtcttgctctgtcacccaagctggagtgcagtgacacgatcttggctcactgcaacctccatctcctgggttcacgtgattcttctgcctcagcctcctgagtagctgggattacaggcacatgccaccatgcccagctaatttttttgtattcttagtagagacagggaggccgaggcgggtggattacctgaggtcaagagttcaagaccagcctggccaacatggtgaaacctcgtctctactaacaatacaaaaaaaaattagctgggcgtggtgatgcgcacctgtagtcccagctactcggggaggctgaggcaagagaatcgcttgaacccaggaggtggaggttgcagtgagccgagatcatgccactgcactccagcctgggcgacagagggagactccatctcaaaaaaaaaaaaaagaaaaaaacaaaacaaaaaaacccactgtttttggtatactgcatgaagattattggaattacacttggaactaattactaccctcttaagtaaccattgttttgttttaggagcagttgcagaagctcgaggttgaactgagagaagtcactaagaacaaggagaaactgaggaaaaacttgctggaactgatagagtacactcacatgctgagagtgacaaagacctttgtgaaacgcaatgttgaggtactgaacagctcgtgaggaaatacagctgtttttataaacagctttttataaaaatctcattcccataggctgtgtattttgctattagttcatatagatatgttgcttcttttaagagattaaatttatttatttatttaattttatattttgtttttgagacggaattttgctcttgttgcccaggctagagtgcagtggcacaatctcggctcactgcaccctccgccttccgggttcaagagattgtcctgcctcagcctctcgaatagctgggattacaggcgcccgccaccacgcctgtaattttttgtatttttagtagagatggggtttcaccatgttggccaggctggtatcaaactccagacccagttgatccaccttcctcggccttccaaagtgctgggattacaggagtgagctaccgcgcccagatttaagagattaaatttaaaccttggttttatttttcagttggattatatgactttaaataaagttttaagagccatttcctgtgttggttgttttcagcaattacaatactaaatatttataagatggtttagtttttggttgaaaaaaatttttatgagcatgagaaaaaaattgaatgaaggatgttgaactctaaaatttactttttccaaattgctaagtaaaggaagtaaaagaataatctataatttctaagactaggtcagacacagtggcttacacctgtaatcccagcactttgggaggccaaagctggaggatggcttgagcccaggagttcaagaccagcctgaacatagtgagaattaatatgagaccttgtctatacaaaaaataaaaaattagctgagcgtggtggtgcatacttgtagtcccagctaccaaggaggctgaggtgagaggatcatttgagcccagaagtttgaggctgcagtgagctatgattgcgccactgcactccagcctgggcgacagagtgagaccctgtaccctgtatctaaaaaaaaaaaaaaagaaaaaaaattataagaataaagaatagtccatgtagtagcaccttatggagctaagtatagaagagacaagtgcatctgttccaaacttagtttcacttgatatgatagtgacctttgataaagttactctatcttggatgaaggcaatgaactaaattataactgtcttttatgtaaatgtcttcaattggyttacaaataaaggatggggaagttatcttttcatttatgaggattgagttataaatctaagttacctcagaagtctttgcacccagatctaagtagttagttaggatgccctataaacttgtttgaaaatttgacatgagaaataaagtgtcacttttaatgagacacacttggtttcatatgtttatttctagtttgaacccacttatgaagaattcccttccttagagagygattctttgttggattacagctgtatgcagaggctgggagcaaaactggggtaggtgacaaggcctggggtgtcaggcttcatactgcccttcttgtaaaaggcagatgagctccatagaagggatgaatggagaccattttaaagcctagggttgaatgaaacatagkgaatatttgtttaagaaacactgtattcctgtacttgttgagctgaattactcagctgtattgacttttttactcaacacaatggaaatttcttttggtataatgagctagaaagaaacaacatttacgtgattcagtgttacttctataagcctaaaacaattggtcattcargcatcaaatcctgtctagtagaaacttggtggctaaaccgagttggttagtttttttattaatcatattttaaagatctcctgctgctgtttattcttgctgcctactgaaactagtggtaatttgtttcctcgtgcgatttgtgatttttaaaattattatgaactcatatttcacagttcctgatctgaaggaattcagtgatatttagtttgaggatgttttcctccagagagaatttgttttgacatttgtcaggtacctgggagtgctctgtcaacctggaatcatttatatttttctcagcattgagatttttttgttgatttgttttttgactgtgccaggaatgtgaatttaagcctcaaacctgagtgaattttaacctgtggttataaattcttagggaagacttctccctccatctagaaccaaaatrgaaataaacaagtttacatgcaggctccaggctcctttgcaaggtagattttttttctggtccatcccttcactgagggtgtagctctttgtgcatggagcagtcccagctggaraggtgagtcagttgtatctgctcaccttatctagacccagtgcctggctcctgcatcccatgctggccttaaactcaagttcttaagatacggggttcagtgtaataatcaggacagctgtgaggtcctgttttccctttggattccaagaatttctctcttttttttttttgaggcagagtcttgttctgtcgcccaggctagagtgcagtggccctctagcaacctccgcctcccaggttcaagcgattctcctgcctcagcctcccgagtagctgggattatgggtgcctgccaccatgcctggctaatttttgtatttttagtagagacagggtttcagcatcttggacaggctggttttgaactcctgaccttgtgatccacccgcctcggcctcccaaagtgctgggattacaggcatgagccactgtgcccagccaagaatttctctttattacaagctcatctctacctttaaaaagaagtttcaaaaatattctgaccagcacctgagatgttttgcagttggagggctctcaggatgtcttcaccacttggtagaaatgaagtcttcatcattcttaatgtagtttgataacatttattgctttcagttgactacaggttgactttactgtctcacagatttgtgtctggcctaattaaccaaggaaaagtggaagcatttgaaaaaatgttgtggagagtctgcaaagggtacaccatcgtgtcctatgcagaactggatgaatcccttgaagaccctgaaacagtgagtaaatgtcaccatcaccttttagcaatgacggactaacagcagagttggagatatggtagaaagaatgtttttctcctgaaccatttgataataagttgttaacctgatgccttatctcttcaaccacgtgtagtgtgtatagttcctgaaatcagggacattgtcttatattgccatcacatgaccatcagtcaggaaatgaatgtagatacattactatgtcctgagccttgaatctcattcaggtttcaccagttgtcctagtatggtcaaagcaaagaatgtaatttagcattgcgtgttggatttagttgtcatgtctctctctttttttaaactttctttttttcttaaggagatggggtcttgctgtgttgcccaggctggtctcaaactcctggcctcaagcgatcctcccacgtaggcctctcaaagcctcccaaagtgttgggattacaggtgtgagcctcctcacctggctttttttttttttttttttaactttttatttttggtagagatggggatcttaactatgctgcccagactggtcttgagccatcctcctgccttggcctcccaaagtgttggggttacaggcatgagccactgtgccaggcctgtcctgtctctctgatctccattctgggacagtttctcagacttcccttggcttttgtgaccttgacattttaaaatactgcaagtttttttggtagcgtgtctctgggtttgggtttctcaggtatcttctcatgagttgactcaggtcacgtgtctctggcaggagcgttgctgaagtgaggctgcattcttctcattgcaccgtcaggtgccacatgtttctgtttgctccattactggtcgtggtccctctgatcacttgattagttccattactggtcatggtccctctgatcacttgattagttccattactggtcgtggtcactctgatcacttgattagttccattactggtcgtggtcgctctgatcacttgattagttccattactggtcgtggtccctctgatcacttgattagttccattactggtcgtggtccctctgatcacttgattagttccattactggtcgtggtccctctgatcacttgattagttccattactggtcgtggtccctctgatcacttgattagttccattactggtcgtggtcactctgatcacttgattaaggcacttctctttagacttcgctgtgaagttactcttttttttgtgtttgaaactgtaaatatcctattcttcatcaggttttcagcttcctcatttatttcctattttatttgatgggttcctgttcctttaattatttattttgatattcacattctcctagatttggccagttggaatccattcaggctggcttttatatccattttacatgttcccatcactttttgagcacttgtttgtacaacaggatgtccagatgcatgttgcaattcctctcacacggctctggaatcaactgtttcttcaaggaggctgtttttttttttttttttttttttttgagtgcaaatcttggtattttgaagccaagatgtggcttctgggtgtgcacattgttactgaggggttgcttttccttggctgtgtcagagtagcttggggacacacacaaaagcacatgcacatatacatttacagctgtgggccagttactctcccccaaccccatccatccccatgtacatacctaacagctgtggggccgaatggttcagaagggagggtggaggcagcggggagagacagagtcataatcacccttaggatatctgttttttaaacttcaaagtaaaaataactgttgttttaaatgaggatgaactgctgatctactaaaggtggaaaaggaacttggttttcttaattttgaggaaaggttgttttttttctaggttggcctcaggaattttggctgtaagattaatatacatctcatagtagttttgacgcataaagagaaatttggctgtgattgattgattgattgatttttacttttttagatggagtctcaccctgtcgcccaggctggagtgcagtggcatgatctcagcttactgcaatctctgcctccagggttcaagcaattctcctgtctcagcctcccgagtagctgggactatataggcgcggaccaccacatctggtgaatttttttatttttagtagagatggggtttcaccatattgaaacaccatcaggagttaggtctttttttttttctttttttttttttttttgagacagcgtctggctctgtcgcccaggctggagtgcagtggcgcgatctcrgctcactgcaagctccgcctccygggttcacgccattctcctgcctcagcctctcaagtagctgggactacaggaggccgccaccgctcccggctaattttttgtattttttagtagagacggggtttcactgtgttagccaggatggtctcgatctcctgacctcatgatccacccgcctcggcctcccaaagtgctgggattacaggcgtgagccaccacrcccggccaggagttaggtcttgaactcctgacctcaggtgatccacccacctcggcctctcaaagtgctgtgattacaggcaggagccaccgcgcccagcctgtgatttrtttttggttttctgaaataaaaatctaatccgtttgaaatctaatcagttaagcccttcattaaccactcacttgtaatattttctacttttttgtggcttttgtaactgccagtgaccatcgttaattatccttcagttgtgaccttgatgacttttctatttcaagctgatgattaaaactaagatcaaaactgttctgaagtagcatttacatattttttgagttttttctttattaagagaaaatatcagtaattctcatgcgagcatttactcaagttaaaattgttttttaatagaatttgaaagttctcttgtgcctctgcaacctccacctcccgggttcaagtgattctcctacctcagcctcccaagtagctgggactacaggtgcacaccaccactcctggctaatttttgtatttttaatggagacgggattttaccatgttggctaggctggccttgaactcctgacctcaagcgattgcctgccttggtctctcaaagtgctgggattataggcatgagccaccatgcctggcctcttatgccaaatttttatggaatatgttaaagggcagtaaacatctgtgaaggaatacagagaatggatagatgtatatcttgaaaatacaatccctgtccccacggttataaagaaaatgcatgtccattatagaaaattgggaacaatgtagaaaacaagaagaaaaagaagtccctcgcagtctcctattctgagccactgtttacatgccaagtgtgttctctcagtctttctctgggtaagataggggtattttatctggtaacttttactcaggttctaggatttgtttatagtgtcaggtttactgtcttttgggttcaatgtctgaccctcttgaagttattacagaccttagagactatttttagccattttcccccattggtgtttctaagtgctgaccattctctctgcatcaaagctagacatgggcgctttcttcggttgtatagattgtgtttttctgttgtgtgtggcatttcttctgccttgtgccttaagtggttgtgttccttgacacactactatgttgcccaggctggtcttgaactcctgggctcaaacgatcctcctgcctctgcccagcaaagtgttgggattacaggcctgggctcaaacgatcctcctgccttggccccctgaagtgttgggattaccattcccagcctctttttcctggttctaactcttttctgacagtgtgaagtcagcttccattatcctcagtgtgtctagtgggttgctcagttaactgacttattcattcattgtattcattctcccagccacatcctccctctcctcctcctgccatcccctccctcccaccaccgcctgcctgtgctatgctgtagctccccagtctgtgctcctgttccctgggcccagggctcaatttttggacagcttctctcttctttctgcctttagagatctcacataattttatgattttaagtaccatgccccaaatgtrtatatccctagcttggacctgtccccagaatactagacttttatgtctgtctactccatatctccttttaagtatctggaagaccgtttctgcttttgcctaaaactgaacatctgatctttcttcccagacctgcccttccagacccattgatctcactgcgcaggctgaaagccctgggcttctccccactcttctctgtttcttgcgtctcacttaaatccctcagcagatctggtggccatgtctgctaaatagagagtcccgccgcctctcctcgctcttcctccctcctggtccaggtctcgtcccacacytgcctcgcctggctgggcccctgctcctgcctctgccttagcctggtctcttctcctggcatccagaatgatccacaggaaaccacagtcagatcatttcattcctgtactcaagaccctccaggggcttcctgttttcctcagcaacagccctgtggagccgcacaatgggcctgtggccctcgtcattcctcagagctgtgttactacatccctccccggcggtgctggcctcctcgagtctcctgactgtgcttctgtgtgtactcctctgcttggaagtctcttctcccagtggccatggggctcgcgtcctcacctcctgcattttttttttttttccatttaccctgacttgaagctcacctgcacgtctttatgctcagatgtcaccctctcggggagatcttccttgcccatcctatgtgagatcacagtgcccaagcccaccctccctccctcccgtctcctcatcctgcgtctgttctttatagcacttacctctacctggcgtactttctttgtttcttttgctgtcaagttgaatataagtttaagttcccttcccctcccaggtcagggatttttgtcagttttcttcactgctgtatccctagcacctataatagtgcctattcagtttttatagaattctgttttgttggatacttgtaaatacagggtgattcttattatttacagtagttatgcttcataaagtcactgagggctgagcacggtggctcatgcctgtaatctcagcattttcggaggccgrggcaggtggatcacctgaggtcaggagatcgagaccagcctgaccaacaaggagaaacccyygtctctactaaaaatacaaaattagctgagtgtggtggtgcatgcctgtaatcccaactactcgggaggcggaggcatgagaattgcttgaacccaggaggtggaggttgcggtgggccgagattgtgccattgcattccggcctgggcamcaagagagagactctgtctcaaaaaaaaaaaaaaaaaagtcactgaaatctctgaattaccaactgtggaaaaactcactgctcctaggggaagtacgggagttgagtcatttacattgagctcccagccagcagctctgtgactcgagcccgaacgaagtgtccctaacacacgccacatctcygtcagggacatcacagcygtcttgtgctcaggacaccagactgcacctcagccctacactcggggctgtttatacmgtgaaatcaccaaaaaaagcacagaagtgtgaaaaacatgataccaaacagactctgaaaaggacacttggtgatagtctgagagcagagatgggaagggagagcgtcaccttgttggactttacctgggaacgcgggtgtcgggtgcctaaaagttttggctgctctgcacatgactggaagcgctccgtggattggtttggggctgttactacaagtaggtgaattcgtaattacagaatcctcaaataaggagkattgactgtattgaatgagtgaatgaatgaacgctttgacagtgtttgagctgccgaagttctagaagtttatacacgcagaaataacacttatccttattcattctttgtagggggaagtcataaaatggtatgtctttttaatatccttttggggagagcagattggccacaaggttaagaagatatgtgattggtaagaaaaagaaacatttcatttcatttatgtctttatattcagtcacctctagttttccttcaacatccctctggagtcagaaatagagtggctgctagtttttgttatatgattctttgctgcactgccaagttcttaaacatttaatttgtcatctctcttaccaatgcattacttaaaataatttaaaagtagagactgtgttaataatattcccagaattgacttttttccttggrgatcagggcttcagattggttgaaaaaggaataaagtttttatatgttgtgacttcatgttgctttgagctaccagtcgggcttacctgtcatcactgagcatgtgcatctcttctgtcctgggtaccctggggcaggggtgtggcgtgtggtgaggaggaggcgctcaggggcctgtctggatgcagagcctccctgtgtcrctgtctcactggactcacttggacaagtgaccaagmctcagtttcttcatctgtaaaaggggagagtgattgctttcttataggtcttttaggactaaatgaaatgatcaggtaaaagacrtcagttcggcataagccatcagtaattttgagttgtggtacaacaataatctgtgacttaactcctgtcagcaaatgggaacataagcaaaagccaaacaaagtcagaaaactcctttgctttcttccccccatggacaactcagcttgccttgtttcttgcagggtggaggggggtttgggcattttctgtttactagaatttggttctcaattggtggaatagaaagtaatttcaggtgtcacctggataaaccttttattttcatagatagatatttgttttactgcagattaaaaaactatacccagctcagcaaacccatgatttcacagatattgttgcttaggataaggctagaataggtatttaatttttcaaaggcagaacttaaagaaaaataaaggtatggtgttaacatatgaaggtggtccgggaatggctgcagtttggggacacagctcgtcattccctcgtgcagtctgggcgccgagtggctgagtggccctgagaggacctgtcaaaggcaactgctaggaagccagagctcttttctccttttgttttctgtgtgtgtgtgtgtgtgtgtgtgtgtctgtgtgtgtctgttgtgtgtctgtgtgtgtctttgtgtttgtgtttaaacctgttcagtgattcccagcccaaggatattgttgaattttaggaagctggaattgggaatgagcttccaggaatcattgagggcaggagtggaatttggatcccagagggagtttgctaaatttatctcactcagcaggtgcttgytgagcatctgtatgcacagcccgaccaagggcagatgactgcatctgcacccgtgtctcccaaacggctgctttcattccgttttgccagaagatgtgccggggaggtgaacgtgtttagttctagtgctgacagatgtgagacygtgttcaactcttgtcttccagctaccactgccacgtgtacccctatccaaacacagccgaggagcggagggagatccaggaggggctgaacacccgcatccaggatctctacactgtgagtaagctggaagtggattgcctctttatctgagggctgccaaacatttacacgtatattttctctcttttttaacatagataatattggtcgtagacaaatcaagatgttctagtgagattggaatgttgcttccctccctcctccccatggaagttttattttagcaacttgttaggmacctgagtagtaatgacaaggctttaaaaaaagattctgtggtcacctttgatatgttggatggtaattcatttttctttttcagacaggctctcgctctgtcgcccaggcttggagtgcagtggcataatctcagctcactgcaacctctgcctcctgggttcaagygattctcctgcctcagcctcscaagtagccggaattacagtcacgcaccaccatgcccggccaatttttgtatttttagtagagacagagtttcgccatgttgcccaggctggtctaaaattcctgacctcaaatgatccgcccacctcagcctcctaaagtgctgggattacaggtgtgagccaccatgctcagcctggattgtgattcttttttttttttttttttttttgaggtggaatcatgctctgttgccaggctggagtgcagtggtgcgatcatctcagctcactgcaatctctgcttcccaggttcaagcaattctcctgcctcagcctcccaagtagctgggattayaggcatgcgccaccacaccctgctaatttttttgtatttttagtagagacggggtttcaccatgttggccaggttggtctcgatctcctgacctcgtgatccacccgcctcggcctcccagagtgctgggattacaggtgtgagctacygcccccggtctggattgtaattcttgatcacaaaagacaagccagctccagttaacatggtgagggcattattttaccagtaggatttaaattcatttttctcttgatgacagtgagggttcttgttggcatgaagtgtccttctgactcagttaagcgagaggatttcttggtaggatgggatgggcgttggtggctcacagggttgacaggggtgaggccaagcttgggaatgggtaggaacccagggagcttgctggatcctggtaggccatcacgctgccgcagtgacaatgacgtctaaccatttcctgtgccctagggtcatgttctccagaggcaacctcccaaaagagggcatctgattgattgggcttagatttttctgcccacctccgagtggtactaggggcagggagaaggaaggaatggctcccttagctgccaccaggataggcaggtgcctggaatgatcctctgtcaatggggagaaagtcctctaagggaagtcgggtgccaggtggacagaaacaaaaacatgcccactccactgaaagcccctgttgttcttccccaggtactgcacaaaaccgaggactatttgaggcaagtgctatgtaaagccgccgagtctgtctacagccgtgtgatccaggtgaagaaaatgaaggccatctatcacatgctgaacatgtgcagctttgacgtgaccaacaagtgcctcattgctgaggtctggtgtcccgaggcggatctgcaggacctgcgccgggcactggaggagggctcggtaaggctgccttcctctcctctgccaggaacagaagagagactgatggaactgataaattcagagaaaaaaaggaagtgagaatttcatagagtaatgagaatgcagtgtgttgactcttcttttgtttttttaaaatattaattaacaaaattaaaatagagatggggttttgctgtgttgcccaggctggtctcaaactcctggccccgagcgatcctcctgcctcagcctcccaaagtgctgggattacaggtgtgagccactgtgcccagccttggctctgtttttgaactgaaattatggtgagctggtcattcaaagctgtatgtgagtacatgtgtttttaaattgctcttttgagtaattcattcacatggtgtaaaagtgaaaagaaataaaagagtatgaaagacacagtgcagtggcttcctcccaccccatagccttacttgtccacttcctccactcaaagataaccattacttcagttctgttatttctttgagtttcttaactgtagataagcagataggagtagatattatttttctttctttttcttcacaaaatggcactattcatactattcttttcacttaataaaacttctctatttttcttataactatttaatattctgttgtgtgcataccatggtttatttaactagttttctggtcatttaggtagtttccgcttttacaaatagcactatgatgtcaaatctatttgtagggtaaattcccagaaatggaattactggactgattttgatagatgttgtcagctattgtatttctctcattgtgagtgaaggggaataccttttttttgtttaagagccttttggctgggcacggtggctsacgcctgkaaccccagcactttgggaggccgaggcgggtggatcacgaggtcaggagtttgagaccagcctgaccaacatggtgaaaccccatttctactaaaaatacaaaattagctgggcgkggtggcacatgcctgtaatcccagctacttgggaggctgaggcaggagaattgcttgaggcggaggttgtggtgagccaagatggcgccattgcactgcagcctgggcaacaagagcaaaactttgtctcaaaaaaaaaaaaaagagcgttttcaattttcttttttttgtgaactatctgttcatattctgcagccattttccatcgtatgttggcctttttcttaccaatttctgttggctcctggtctgtgacaccagtaagaatattttccccagtttgtccctcgtcttttgacttaggatgtttctgtttgtttatttgtttgtttgttttggccatgcagaagttttttgttaaatatagttgaacttatccatctttgctcttacaccttccagattttgaatcacaggcttttcccactgcaaggttatagtgtaattcttccatgttcctgtgaggtttttcttctacattaaactcagattttggtcatggaaagaacaggtttacatatttcaagtgacagttaagggaacacctttttcrtgagttttttggttatgtaaccttgtctcattacataattctgtgatgatacaaatgtaaaatataatgtccattatgacataaacatgaaatacccagtgctgagaaagacagcaacacataaatagtattttgttatttagagtaggaaccacctatttgagagataaacacagatgattcttcttttactgaggtgacatcagtttgagggacatgactagtactcctgttataggtggtgtgtgtgctgctttgtgactttcaaggtggctgcattcgattcagatcgagcccatggtgctgcttctgccatctcctgcgtgcacatgcactggggtctcttgagagctgcgtattaaggtctcagtgaccacatgtccacctccggctgcatagctgttctttgctccgctcgtgggcaccgactcttcgtttcccgtcaagggtactgagctctcagcccacctcttactgctyatagtccctgtctcttcgctttcctcatctgtcctgtcctgtgttatttttctccataagtaggtgactgagacgttctccagtgttgatgaaagctggctcatcacctgcattcccacacctcatgaatctggctcttcacagttgccttggtagtcagcttgtgtctacaggatgccttttttttctgtcgccaagattgaatttgatcaggtacacaggggtctcacatgcagaactcctaacaggctgtgccaggcggaagcggggaatctcagcctccagcctgcagatcccagttcttgggttcacttggctgcctgaagctctctagtcacttggctgcctgaagctcattccctagagragcctcagagaggcttgcaagaatcatattctctgaattctcatgttgatcacagtggctgtctgctgctttttataattaggagtgagtttttctggaaataaaattctgggctcattttttycccccttgagtatcttacacatgttcctccatcttgttctggcaccttgctcccaacagaaagcctgatgttaatctaattttcttttccttgtaattcatgtggttttttagtttagttttttgttttgttttgtctagaaaaatatcttttctttttctttaaagaccagtgattttcagcctgggcaacatggttaaaccgcatctctacaaaaaactcaaaagtcagccggatgtggtgatgcacctgtaatctcagctactctggaggccggggtgggaggatcgcttgagcctgggaggttgaggctgcattgcactccagcctgagcaacagagccagaccttgtctcaaaaacaaacaaacaaacaaacaaacaaacaaacagtgattttacagaatgtctctctctctctctttttttttttttttggagatagagtctggctctttcgcccacgctggagtacagtggcatgatactggctcactgtgcaacctctgcctcccaggttcaagtgattctcatgcctcagcctcccaagtagctgggactagaggtctgcactaccatgcctggctaatttttgtgtgtgtatttttagtagcgatggggtttcataatgttggccaggctggtctggaactcctgacctcaagtgatccacctgcctttacctcccaaaatgctgggattacaggcgtgagccatcgcgcctggcccagaatgtgtctcttmacgtggtctttctgtatgttctttcaatatatagtctttggtggtggttttgttaatttcataaacgttctcctgaattatagtttttggtatttgctctactgtcttgctttggttttcttcttttaggacctcctrtcatctttcagtggaaccttctttgcttatcttcagtatctgtcactttcctttgaatcctttttgtctttcgttacttctttttgatttgtaagatttctcctcttcgcgccttctgtttctcttacggcagtatgaggaagggttcttcacttttgtgttccttctagttttgtcttacttctgaaataatttctttctttttttcctaattccttcttgagttctgttacctcatttctgagtcttttaaaatctgattcctggtgctttttcctgtcctgtattttttttttaattcttttaactccttttgaaacagtaagttacratggttttatttgttttgtggacattctttctggcatcttctcactgtctgtggggatggtattctactccttggcttttttcttcttatgaccttatgtaagattgggcttctccctcctcttgctcacttttaaatgaaattagacttttgaggctggatgcggtaactcacgctggtaatcccagcactctggaggctgaggcgggcggatcacttgagtccaggagtttgagactagcctggccaacatggcgagaccctgtctctactaaaaaatacaaaaaatacacaatagaaaaaaaattagccaggcatggtggcacgtgcctgttatcccagttacttggaaggctgagtcacgggactcccttgaaccccagaggcggaggtttaaaaaaaaaaagatttatggaacatggtgaagatgcttagctgctcaaggaaattcattttttagacaaggtctcactctgtttcccaggctggagaacagtggtaatggtcgtagctcactgcagtctcaaactcctgggttcaagcaatcctcccgtctcgtctcagcctcctgagtagctggaactacaggcatgcactactatgcctggctaatttatttatttatttagttagttatttatatttttttgtagagatggggtctctacaaaagacggtgtctggtcttgaactcctgggcttaagtgaccctcctgtctcagcctcccaaagtgctgggatgacaagcatgagccaccatgcctgtcctgctcaaggagattctatattattacacaagcaatataaatgtatatttacatgaaaatagttttctggcagatgtttatggtactcaaggaacttttagaagatggcaggttcaggatagcgatcctaacctcactgatggttttttcttttttttattttttgtgtactgaatgcaaacacgtcgggtcctggatctgagatgtcctctgtgtctctcttgtgaactcctctgtcttttctctttcgttcctgtcctgctcagttttgatctcactcccagcagtttctcctcagcgtgtggccgctcaacaggggaggacctggcaggtcagtgccgtgagtttagggactgggctgccctgccccaacccctgcagacttcactgcccatggcccctgtgccgtcgcctactcttggactggacagaactcttcccagttccagctgctttttgtggtttggcctcctctgctttcccagggaggttctttctggccatttttggtgttgttggcccaggccccttggaggccacattgcttacttgcatcctctgctctggaggctgctgggtaggtcttgtagctgttggtggtttcctcacccatttgtattttggggactgtggggacgtggtttggctgtaaatgccatccgtaggctttaggtcttgctagctggttgcactttctgttctgaaggggacttggggacgttcaaagctgtgccaccctcgagaatttccccagaaccccattacatgcatacgttttaagagacacattttggccgggtgcagtggctcactcctataatcccagcactttgggaggccgaggtgggcagatcacctgaggttaggagttcgagaccagcctggctaacatggtgaaactccgtctctactaaaaatacaaaaactaaccaggcgtggtggtgtgcaatgtaatcccaactacttgggaggctgaggcacgagaatcgcttgaacctggaaggcagaggttgcagtgagccgagatcacaccactgcactccagcctgggtgacagagcgagactccttctttaaaaaaaaaaaaagacttattttgaccagaaaatctactattctgtcaataacctgtttaccttattttaaaagtgttttcattataaatcaatataatgcatttcagaagaattgcaaacactgatggataaagttatatttatgattctgccataatagaattcatgttgacattttggtttattcttgcctttctcatttttttattaagtatattgcagttgtctcaaacttcctctttcttcaccgtttttaagagataaagtactcagtgtcggttttctgtcagtgactgagccgactccatacccacgtgccccgcattccccagcccccattcacttccggcgcattcagtcctgctctcacccttccttcttggaggccacaggccccaagtgccgcccttgccaccccctgattcctcacagatggacttttcctccaggccctctggctgctcttgaccctgttgagtggagattaatcctgcaccaaagccacacacacagcgttgccaaagcagtaacacaaggctgggcacggtgctcacacctgtaatcccagcacattgggaggctgagacaggtggatcacctgaggtcgggagttcgagaccagcctgacctacatggagaaaccccgtctctactaaaaatacaaaattagacgggcatggttgcatatgcctgtaatcccagctactagggaggctgaggcaggggaatcgcttgagcctgggaggcagaggttgcggtgagccgagatcacaccattgcactccagcctgggcaacaagagtgaaactccgtctcaaaaaaaacaaaacaaaacaacaccaccaaaaaaaaccaaaaaacaaagcagtaacccagattcgttgaatatggatagttattttcttcttggatagtaattttttatctttccttgtttatgtggaagagagagagtggtgctacaatcccctcattcatgaatataatccccacaaaagaaacaccccccactcggatccgcaccaacaaattcaccgagggatttcagaacatcgtggatgcttatggagtcggaagctacagagaagtcaatccaggttggaagtctgatttgtaaatacccgtatttccaatggcattgttgcattcttgctctaagaatggaatagatatttggaaagagaggctgaccattacttttttgctatcttatttaaaagtataaggttttaaatgtaaccacacaatcctatcttgtgaattctggagaaagtcaagattgttatgtatcattgtgtttgaatgaactcaggttttccatatttgctgtgaatcagaaatctctttcccttttttctgcagctctctttaccatcatcaccttcccgtttttatttgctgtgatgtttggagacttcggacatggctttgtgatgtttttatttgccctcttgttggtgttaaatgaaaatcatcccagactaaatcagtcacaagaggtaaaaatataaacactccagctcatatatctggttaggtggcattagcagtgaccgaaagagagacacctcttagatgtttgctgtaggctgcggctgtgctgggcaggtgtgtggcctgtcagctgcggctgacagggatgtctgcggggcgaggctgttttctgagaagtgagtggtgagggtcgtgcccacaccgacagctgtcacatggacaccctccagtaaccatattctgcccccgccttgcccttcacagatcatgaggatgttttttaatggccggtacatcctcctgctgatggggctgttctcagtgtacactggcctcatctacaacgactgcttttcaaagtcagtcaacctgttcggctctgggtggaacgtgtcggccatgtacagctccagccacccacccgcagagcataagaagatggtgctttggaagtaagtgtcccatagctggtgatgctctgggtggaaagcatgtttcctagaccttcctcctcccaggtcagcctcctcactctgctttttgttacagygacagcgtcgttagacacaacagcattttgcagctggatccaagcattcctggagtgttccgaggcccttatccccttggcattgatcctgtgagtgcaccacgctctgtcgttgtctctggatgctctgtggtgccacctagcttcgggcgccacgagtttctctagactgttgagcagggttcacgctgccctgagcgggaggtgctcattagcccctgtgcatcccagtcccggacactgggaggggaggccaggagctggggggccctccgtttgggaaggtgaggtcagaggaagtcctcagagagccagggctgtgttctgtcatgtgtcctacctattttcctctggctgaaaatggcacttcagtagccctgaaatgtgtgccatttcctacatttcttcctcgtatatgtgaacttttaaaaacccttgatctcgaaagaaatggtatggagtgttagagctgaaaggaagcgtgaggttattatggtgcttattggggtagttgtttggaatgggaaaagtgttaatagaaagaaaatggggaagtactcacgcctgtaattccagcactttgggaggccgaggcgggcagatcatgaggtcaggagattgagaccatcctggctaacacggtgaaaccccatctctactaaaaatacaaaaaattagctgggtgtggtggctggcgcctgtagtcccagctactcaggaggctgaggcaggagaatggcgtgaacccaggaggcgaagcttgcagtgagccgagatggtgccattgcactccagcctgggcaacggagcgagagactctgtctcaaaaaaaaaaaaaaaagaaaatggagaagtagccccagggtgccaggacccccaaccccttcgagggctcagcaggcggtggctgaggcagtggactgcagggttgggtggggttttcctgagctgtcaggagtctttctggagaatcaaaagaatgactgagaaacaatctcaaagttggtttgtggatgtaattgtgtacagtcgttaaactgagcaaaaaaagtctagcattccttaacctgggctctccaaggaggaagtatctcttagtgtgttctgtttattcttatctctaatcatgattggtataatttcatgttgtagcattaagtcttaatgtaattgaaaacttggaaacacggctacaacaatttctttaagatacagcattttggagccaaattcagtaataacttgtagctttgtgttaaggaaagaaatatttctgaataagggaaccaaggaagaaagtttgagtgagttttttttttgggaggcataggggaaaattggggtatggttttgtcttctttctgttttaacttaattttaaactaggcattacattaatttggttcaaaagtaaaccaatgtgtgtacgttatacatataaaatacgtattttaaaataatatataaaagtatgtataatataaatatatcagcgaagttgactggcctccaacttctcagccctgaatacctcattctaaaatcttatttttgcaagggcaaaatgagatagttcagggctaggaactgggaggctagaaattttaaaattagctgggagtggtggtgcgtgcctgtggtcccagcttctcggaaggctgaggtgggaagattgcttgagccaggtcaaggctgcagtgagccctgattgctccactgtactctagcccctgggcagcagtgagaccccttaccttaaaaaaaaaaaaaaaaaaaaaaaaaggttgggcgcggtggctcacacctataatctcagcactttgggaggccgaggcaggcggatcacctgaggtcaggagtttgagaccagtttggccaacatggcgaaaccctttctctactaaaaatacaaaaatcagccaggcrtgctggtccagcyactcaggaggctgaggcaggagaatcgcttgaacccaggaggtggaggttgcagtgaaccaagattgcgccactgcactccagcctggttgacagagcgagactcctcaaaaaaaaaaaaattatcttaatagaccctgtttcccttttcctaacccacctgaagggcaggctgtaggaattaattttcagacagtaagagaagcagtcaatgagtggggaagttacggggactcagactggccggggcaccgtggggaggtcagccatggtctggagtccctcttggcacatcttgggttggccacttgcaccatttctgatttcattgtattcacagctaaactttatgacaaaatagacatacaggagcatgtatggcacatgtatgtaaatgtgtgataacacatgtatgtctcctgcccaggtagaggggacataacccaggaccttgagagcatcctgacccttccagtctctgagctgtgtgtgactctcccttgccttgccttttgtcaagacttcctaggcacatctccctaaacgctatgtggttccatctggcaccctttgacgttaacaccgataaaattgttttgtaattgtctgtggccctggtttaaggaaatcaatggttctcagattgaaagcatcaaaagaaaagcctgaatattgtttccttcttaaacttagagccacctttcaagttaagacaggaactttcttgagtgtcacctgttgaaggaagttaaagattctgttttgtcttgtttggtttggttttagatttggaacttggccacaaatcgcctcacttttctaaactctttcaaaatgaaaatgtccgtgattttaggaatcattcatatgacttttggrgtcattctgggaatatttaaccacttgtaagtacagatttttttttaagcaatatttataaaccaaacttggcatttcttcaattttgcttcttgttggtgactgtatttattgggtaaggggcagccaatatgatgttgtatttacatgattctgttgaagttatttagattttctgtggtttcagcaattcattcagcaaatatgtatttatcgagcgcatagtagtgccaagtgctgttctaggcactaggagttcagcagtgaggagggcagaaaaaagttgttgccccagtggagcttccattcaagtgagggagacatgtgacatgtgcattcatgtcgatttccagaaggggtgcttgccatattccttttttattttacaaataaaaaatctttttgtttttactttattagagctagtatatgaagagtaagagatggtgtcatttttctctaactagacctgttcattctgatctctaaacataatttgtataatttgatgctgtagcttgaagtcactataacaggagtcttgaaaaacttgtaacaatgtaagacacagcattttggagccagattcactaatattgtgtagccttactttaaggaaggaaatgtttctgaataagggaactaaggaagaaagtttgagtgagatttgaccgcaaaaactgtagtagttttggccgacctcacgtctcttcctcgtagatgtatctggacactcagatgtatctggattcatcatatgagaaatgatgttattctgaaattcgctttatagtttagttgcagagagtttaatttactctttttaacttaggctgatcttgttcgtgggttgattgattccttttctttcctaggcacttcaggaagaagttcaacatttacctggtttccatcccggaacttctcttcatgctctgtatctttggataccttatatttatgattttctacaagtggctggttttttcagcagaaacctccagagttgctcccagcattctgattgaatttattaacatgtttttattcccagccagtaaaacaagtggcctttacacagggcaggtgagtcatcttcccaccctcatgaacttaacggaagtattcccaatagtcttttattctgagcagtagaagtgttggggtgatctccacaggagcctgggaaggctgcttctgtctctgcatgtgtcatcactggaggatgccagtccagcttgaccgctgtgtgcaggcagcatgaccaaactcgctgccactcagtagccatcaaaacgagtaggaagaggccaggcatagtggctcatttctgtaatcccagcactttgagagaccaaggctggcggattgcttgagcccgtgagttcgagaccagcctgggcaacacagcaagacctcatctctacaaaaaacacaaaaatttgtcaggcatgatggctgcacctgtagtccgagctacttgggaagctgaggcaggaggatcgcttgagcccaggaggtccaggctgcagtgagccataactgcaccactgcactccagcctgggtgacagagcaagaccctgtctcaaaccaaaaccaacaaaactggtgggaagaaaatgcattaccagagggatcctgagggctgcccagtccccccatttagaagggaccacctggatcacagcacatggaccctttcaaaaaatgagctttcctctcactgtgcgtttgtgtgctgtcacagtgggctctaagggctgactgctctgcttggaggccccgctctgcygtttcctcaggatggagctttgagcagatgactaacttctctctgcctcagtttcctcatctgtaaaatgggactaaaaacaggagctggttcatagtatagcgcacgtgtccaaagtgcgtacgaacgtgcttgcacaatccagctactcagtaaatgtcagcatttgccatagttcttacccaccttacattgagggtctttctgctgtgrgcgccacggcatctcctgcccacggatgctggtccagacatggctcaccacgttgtaaagtgtctgtgaggacatctggggaaaccctcccagtcggtagtatcagagcctgtgttcctcctgagccgtgttttggtttttcatcgtgttgacctgtgaatggagcatttggttttgtttttcacattctattgggtgctggaaagttttaagtcagatttgaagctcaacttaacggaactttggcctcgttgacgagatgcatatttgcgttctttttgaactttttgtttctgtttttttttggtttctcttgtttatgatttttaagaattgtattttatcattattttattgaagctttgtacaatggcatagataccacagataaatgcaggggcgttcagtgggcacaggtgctatggacagaaagatcaaggaagggcagctacctttctttactacctgccgcatacctgagagtgtgctttccttacttagtgtttcttaattctcacaacagccccaggaggtaggtgtgtcatcccctgttactggtgataactggtggctcagggcagtcctggtcactcagcggtctgtagggccaggctgttaacctaggtcagcctggctccagcccaggacttctgatgtggctctgcctgtggccgccacctttctcggcatttcaagaggttcatcctgttgatggtgtgtagataatacagctttgtgcctgagtagcacacagagctctaggaacctgtttttggtgaggggcgaccatacagagtgataagcttggacagcacagtgtcccgtccaaaccctgggaagccatgcagactgccgtggctgtgtaagcctgagtggattttgcttttgatttagctttaagtaactataaatcttcgtttttctaaggaagtgtttttggttttgttctgaattctcttccacgattttctgtgtgtggaggtaaatccacttgctgattcacactcatagtcctcagacggtctttataatcatcaaagaacaggaaaacagaaccaagaatatacaaaatattctgcttgtgcttatactttctcatttacagtgtttacagaaaatgattagttggagtttgactctctttagaatttttgtaaagtttccttgctggtctaaaacaaaataatactttaccacagggtcattaatgttattcatcagttctagaattcagctatgagtttaggaaaagaaaacccgctggcaagtgtagctggctggcatttattgaatgttcctcgcgtggagacattgttcgatctttcctgatttcatcgtgtgctgctgaccctgcaggcaggccttcacgttttaatcgggtttctcaccttctgcactaacaggagtatgtccagagagtgctgctggttgtcacagcattgtctgtccctgtcctcttcttgggaaagccactgtttttgttgtggcttcacaatgggcgtagttgcttcggggtgaaccgggtaagtgcgggtttggatgcatttacaactgtgagcaaagcttgctttcggttatacaaggattggtgtagaaaacacctcctggagggtccctgtctcttgatttaaaagccaaagctccctttatttaaaacattgatgttggctgggtgtggtggctcacacctataatcccagcactttgggaggccaaagcgggcagatcacttgagcccaggagtttgagaccagcctgggcaacatggcgaaaccctgtctctaccaagaatacaaaaataagccggtgtggtggtgtgcacctttagtcccaggtactcgggaggctgaggtggaaggatggcttgagcctgggaggcagaggttgcagtgagttgtgatcacgccactgcactccagcctgggcaacagagcaagactctgtctcaaaataaataagtaaatgaaacattgatgttgaaagagcctgctgtgtccagggcctgtggagacccgccctggtatgaactacaagcttattaggggtttaactcagtccttcagttcagatgggcacaatttaaatgcctttttccatattcgtcttaatttcttctttaagattttcttttttcttttcttttctttctttctttctttttttttttttttgagactggagtcttcgtctgttgcccaggctggagtgcagtggcactatctcagcttactgcaacctctgccttccgggttcaagcaattctcttgcctcagccctcaaatagggggactacaggcgcccgccaccacgccctgctaatttttgtattttttgtaaaagacggggttttgccatgttgcacaggctggtcttgaactcctgacctcaggtgattcacctgcctcggcttcccaaagtgctgtgattacaggtgtgagccactgtgcctagcctaaagaacttttttattctcaaagagctgaatcattaagagaaacaaagaaactatacaagtttggttttgtcacaaccttgtggttttacaggcactgactctgtgctcttttggttgttagagtggctacacacttataaggaaagatagtgaggaagaagtttcattgctgggaagccaagatatagaagagggaaatcaccaggtggaagatggatgtagagaaatggcgtgtgaagaggtaaatcttttcaactgctattgataaacttagataagtaaccaagcttccatagagataatcatgttaagataatatttaatcatcttaaaaaatggttaagaaaatgggacttccagcctccacaactatgagaaaccagcgctttccaaatgctgtttgatgatagagttggtggcattatatgagttcgggtcattttgtcctttcacttcgccagtgggatttctgctgttatattaagagttatgattggagtgacttaaggtgccatgaacattgctttcagaagcttcttgggtcagtcagaacttttccatagttgcaagaaatagagacccagttttttctgattgcgaagggattttactggctcatggcaggacagaggtagagttggtttcaggataattacagttttggggtctccaattccaagaggccttggttggctttttttctttgtaagttttctttatattgtgaagtcagttggccccatgatgctagaaccatggtcacaagttgccctgggcttattttttcagtctttccattagagagcaaagcgcccttaccagcttgttactattaggaaagaatccccaaatacctgccatccctggaccagtgactgctgcctcagtcccctttacgagtgaccgctgcctcagtccccttcaccagtgactgctgcctgagtcccctggaccggtgtctgctcagtctcccttaccagtgaccactgtgtcagtcccctttaccagtgactgctgcctgagtcccctggaccggtgtctgctcagtctcccttaccagtgaccactgtgtcagtcccctttaccagtgactgctgccttagtcccctttaccaatgactgcgttctcagtcccctggaccagtgactgctatcttagtccgctggggctgccataacaaaataccacggactgggtggcttcaacaagagacttgtttctcacagccccggaggctggcaggcccggactgagatgctggcaggctgctttcccctgaggcctccctgctcagcttgctgtgtcggcacagggcctttcctctgtgcctgcacccctgtttctcctgctcttcccagaagacagtagtcacagtgggtcagggcccacctcctgacctcactcaaccttgattacctcctcaaaggttctgtcttcaaatacagtcacattgcggttagggcttcagcataagacttttgggaacataattcagagccagtgtggttgggggtacgaggctggacagggaagtagcggctccccgcaaagaacagaggtgcagtcccaggaagacagcagagcatggcctcctttcttttcatggaaactttattttggccatttagtgaggaccaaacaaaatgtcttataatcaacattttgtaattattatgtaatttcgtgttttaattcgggacaattaataattaagttctaggatcatagagaaacaaaagcagagctggaaagcgcatgagagtcaccttgcctggtgctttgcagccctttccctgtcaggggccccttgcatagttttccctggttggctctacttagaatgctcacatctagtgaatcgcagtctactcttagggttggtgaatacctattttatcagtagatgtttcataattactgagacctgccccagaatcccattagtatagcagctgtggccacggcagttcctctggtctaccttcttggtttacacaggggagtctgaggcgtgcggtgggagtggggctgatgaaggtggggatttggggtggtaaagtctggtcatggagctgggtagtggcagagtggtgaacagagtgcgtctggggtttctgttcctcacactctagcgtgttcttaccagcatccagccggcagctctttcattgtaatccttgaagtggaacccacttggcatgtagaagtacacatgtaacatcatgactcttaacatatgttgtgtgatctctctcagtttaattttggagaaatattaatgacccaagtaatccattccatcgagtactgtctgggatgcatctccaacaccgcctcctacctgaggctctgggcgcttagcctggctcacgcacgtaagttcctgcttagacctgcagttcccaatgccctgtagtgccagcagactcagggggcactgtgggatattttaactttgtaactaatagtcatagcaccatctttcagctgccacgtgaacttacactattcactacttaatacacagctctcttggctatttcttttggctgaggagtgctgtggaaaaatcacagagggagtctctctgaggctggtctggcttcagagcctgcccaatttaaaaaaaaaatcactgagacacaaggggctttgagaactgagacggcttgggagcctctggtgtaagcacttgctactgttgccattactgtttctgttagtagttatttcattcactgctgccttaccaagtgtgaatatctgtttatttcaagcaagtcctgccacagcactcatgggtagccttgatcacaggagtcctccctttgcacaattccagtaatgcacacatgttagtttccacagtgtagttaacacctgttccccagcagcatggttcccatttcagtcaccacagtacctagccgtgcagttaggtgcaggtgcatttaccagcctacgtgcggcaggtgtcgtgatgaagatgctgataacccaccagtggtgctcggcaatgtttcaggacgttgaaggtttgtgcaaagggtgcaatgttgcaagtgggttcagacgtagaaaagaataggacaggccaggcacagtggctcacacctgtaatcccagcactttggggggcccgaggcaggtggatcacctgaggtcaggagtttgacaccagtctgaccagcatggcaaaaccatctctactaaaaatacaaaaattagctggttgtggtggcgggcgcctgtagtcccagctactcaggaggctgaggcaggagaattgattgaacttaggaggcggaggttgcagtgagccaagatcacatcactgcattccagcctgggtgacagaccgagactctgtctcaaaaaaaaaaaaaagctaaaaaaaaaaaaaaataggacaatttggcaagtattaggaaagatgcttgctctgcatcaggtcacccagcttgccaatttacacagcaggaaccaagcactgttcaaactaccctaataaacttttttttttttttaaataacagacaaaagactttaatactcagtgcttctaatgtttcaaagatagatttaccattttttcatttccctatattttttgttaaaacattaataactctcttattagctgggtgctgtggctcacgcctgtaatcccagcactttgggaggcctaggcgggcggatcatgaggtcaggagatcgagaccatcctggctaacacgtgaaaccctgtctctactaaaaatacaaaaaattagccgggcgtggtggcgggcgcctgtagtcccagctactcaggaggctgaggcaggagaatggtgtgaacccgggagacagagcttgcagtgagccgagatcatgccactgcactccagcctgggcgacagagcgagactctgtctcaaaaaaaaaaaaaaaaamaccgaaaaacaactctcttattgttggccaacaatatagccaacaataagagagtttttaatgttttaacaacaattttaaaggccacagagcaaaccatttttcccatggattaatagggatgcttcggatggttttgattgcaaggtctttactgtgcaaagcaagcactgcctgtgcttgtggaaaccaccggacaagagggtgtcttttttttttttttttttttagttaaaaaaaaatgcttatgtttttataagcatagccaaaggtctggaattttgtggctggaggggccctgtctcgttcatctccattttgcagaggtggtgactgaagccactgagtgtcggtgctttactcatggtcatccagttgatccctcagtggcagaaccaggcctgggagcctgtttctggctgcctggtccagtgcgctttgggaggtcacaacccaaacctagtctggggcaagacctccctttgggagatggcctctgatatttttggagcaccaggtcttccttagtgtttgagaccgtctcggagctgactggctttcacatgagaaacagttgggtctgtgttacatgtgtgtctattattttatgggataatagttcagggccgtcagggggaaactcagtccaggtagctcacagagggacccactgtacataakcgagcatgacctgtgcaggctgcactcctttgcaragttgtctgatgtcctgtgggccatgctgatgcgcgtgggcctccgcgttgacaccacctatggcgtcttgctactgctcccggttatcgcgctctttgcagttttgaccattttcatccttctgatcatggaagggctttctgcgtttcttcacgccatacgcctccactggtgagtttgaaacctagccttggagctgttatttaaaaaacatacccgcccccccactgccccgcccaaccaaatatacacagcccctgcaaaatctaatgctgaatttaggccagttcttcccttcccttgggatctgtgttcatatcctctgagttaaaattgtattttgggccgggtgcggtggctcatgccggtaatcctggcactttgggaggccaaggcaggtggatcacgtgaggtcaggagttcaagaccagcctggacaacatgatgaaaccctgtctctactaataatacaaaaattagctgggtgtggtgtcgtgcgcctataataccagcttcttgggagactgaggcaggagaattgcttgaacccagcaggcagaggttgcagtgagccgagatcatgccattttactccagcctgggggacgagcgaaactctgtgtcaaaaaaaaaaaatgtattttgattctgaactattatcactgacaagtaaaagtaagtttaagtttgcagaatactaacgtatgtttcatactcctaattcactttgggtctgacaggttgctctgtcttattgcaagataaatccttcttatgtatttcttaatgttttatggtgtaggtcagattactgctctgtgcctccagtgactcaagtggcaggagagggtctcgttacttgtgcacgtgcttttgtgtgttgggcagtgagagacagcggatgtgtcagagtttctgttcacactgggaaagccagcacggggttgggggtgcggggcagtgtttagctaagtaaaaatatatgtgccaagaacatattttggaatgaagcaatttcagcacaggaatttttttttttaacttataaatgttgttttaaggaatgtgatttcataatcttccattaatacatggctttttttttttttagggtagaatttcagaacaaattctacgttggtgcaggcaccaaatttgttcctttctcattcagtctactttcatcaaagttcaataacgacgacagtgtggcatgatcatattgctgtaaccaacaagctttcagatttatggagaatgaccatgttatagactttcacttatgtcagatttatgataggaaaaattccatcttcattactgccttatgacatagccaaataattctgtaagatatacctcttcctcatatgttaaatattttgtaaagtttaccaatttgagatataaaaatttcttttggttttttatgatgagcaaatataagttaatgccaaacgttatgttaaagttattttttcaaatacaggatttggggagagaagccaattttgcatggctagttgaaaatggtattagatacttatttcctttaaactttatttaaaacaaacaacagagttaatctgtcacctgaagttgccagataatattttccaacagctgaagtagggatagttttttaaaaaatttaatgatgggtaatcaaaacattcacatttattctgctggatttaaaaatatgtactttttttttttttttgagatgaagtcttgctgtgtcacgtaggctggagtgcaatggcacgatcgtgtctcattgcaacttccgcctcctggattcaggtgattctcctgtctcagcctcccgagtaactgggattacaggcatgcgccaccgtgaccagctaatttttttgtatttttgtagagatggggtttcaccatgttggccaggctggtctcgaacttctgacctcaagtgatccacctgcctcggcctccctaagtgctgggattacaggcgtgagccaccatgcctggccaaaatatgcaaatattttttatcctgtgctacctagaattacaagtagaggattgtttttacaattttgtcttgttttagtaattggggacaatgggataaaatgacatacaacaaatggttatcccacttgtatatttttttaaagactcttatcctgttacccttacataaaaccagttatgataattgtatgtttggaagataaattgtatgctgagccttaaaacccagtgtgactgtagaagatataatgcggacatgatttgaatttagtgacagcttggctgatgtcactgaaccagaagggtttatactgagtgaaggaaaggtaaaaagtagtattttgtatatttttgtaacaaaatataaatgaagatattttaccatgaagagattgcacttatccttgagaacagtctaaatataaatgaagatattttaccatgaagagattgcacttatccttgagaacagtctaatgatactttttttactttcagactgtttctagctaaagttctgataaaagtattgagttaatttaaactttcaaacactgtttagatcagttgaaaactaattcttaatagccattgttttataatctttagtttaaattcatctgtttgacatttggttttttgtgaacttgagtcagtcctattgaacattttgacctatattcttgcaaattatgttaatttttcatattttagtttgattttagacaattattttcaaaaagaaacctgactttttttcaccttcttgacattgtgagtgatacacgttaaaaggctatttgcccgcatcctcctctatcctgtttcgaggtagagagcttggcacttctgttacaagctgagagtctggaggtgctgagtttaacgtggctgtgcaggtgatttcaaggcatgagctgaacagcgttgacacagccgtgacttacaattaaaccctttcaattacagtacagattctgtgtgctacttgatgagatgttacccaaggccagtttggacttactgctttttgtccctcatattaaattatcaaatgatgccgatgaaatgcttgaaaatgattctgctctcaaagttatgcttccctagaaaggtgtcatgtcgggcacttgtgttgggtgactatgacatcccagcagtgctggtcaggtctcagagttgctttcacctagagctgatgcttccacaaggggacatttgtgttactttgctccaggggtctgtcataaaaacaatggtaactacttcatccctaggaagcccaagacttcagggcactgttagctgattggtaaataagggacacgatattcacgggaattgtttactgctccccactagtaattctcatggggccacttttttaactctttctaattaacacctcttctcagcatagagcagaggatgcagtcatttctctgttgaaatctatgtagtatttatgtagaatgtcattatatgaaaagcgaattcagaatcctaactctgggaaagcgctctctggaaatgtagtttgataatagtgtcttataggggccacgggaatttgtttctctataaagcgatgggctccagtgtcatgttaccagagttatcgctcagttttgtttgttaaggcttttgctagaacctattatgtatccagtttttaaaacatacttcattcccttgatagcagagatccagagcacagatggcaagttgtgtggatgatactgaatatgtttattttcctaaagataaatgtcacgacacgacatttctcagtttttatttagatgtttattaccatgtgttaacagaatcttaaaacccaagggatttcttcagtaaactagactttgattcaacctgctgggctggagactgtaattgccgtggtcagttaaggagtgcaaagggtgttctgtctgataggatctgggtgagccctgcggactttccagcagcgaaaggacttggaactcctctttcgctgaatgctgctctgtttctggaatggatattttataacaacattctggtgtcagcatcccctcagcagttgtttatttaaaaatttttttattttttttgagacagtgtctcactctgtcacctaggctgaagtgcagtggtgcagtctcggctcactgcaacctctgcctcctgggtttaagcaattctcctgccctagcctcccgagtagctgggattacaggcgcctgccacagtgcccggctaatttttgtatttttagtagagacagggtttcaccatgttggccaggctggtctcaaactcctgacctcaggtgatctacccaccttggcctcccaaagtgctgggattacaggcgtgagccaccgcgcctggccctctgcagttgtttaataaggcacagaatacctgtagcataggtcagccttacgatgtccatgaattacatattcagacgttttagagcctgatacattttggaaaagaaaaacaacttctacacctattctacagtccgcatttaaaacaataaattcctctattaaaaacgtaaagccgggtttgcttgcgtgccacagggaatatatccaggaaggttattatgaagctgtcaaatcaagatgatggaaataaggcagtttgaacgaacagtcttcccacagtcaggccatttttgctgatttggtttagaattttcagaaatacttagtacactccacctgttctttgatgggaatatctaagaaggctaggtaggttcttagggttagcctgagtcatctaggggctcaactccttgtgaggggaaatgacagtgaacaagttagtactttgctccacaaatgcatgaaaggacaaatttgcatcttctatcagtatttaacttccttttgctaatgacaaataaatatatctatatttttaaacgtgggtgttttgctttattatgctctagtttggcaagaaagctaaagaactctgctccttccctgattttgtaggccatgaggaactcgtgctttctcggcttatttcctcctcgtctggcctctaatcccgcctctgccaccgccgaggtgctgtgaccttcgtctcgccaactctctagccccagcttcatctgcaaggtgggcgggctgcttgcaaaccggtcggcgtggggtggggtcgcaccctcggctgcagcggcccgagggcggctcctggcggcgagggtcccgctccgcatccaggggcgtgcgcgctgccggggccagggagcaaccagcctacctcggcggcccgggggcctggtgcgcgcctccgagatcccggggccggggcgtgggctgcggatcgcgggttcgggatcgaggggccgggcgcggggcactgccgagcttgcagcccccagacgccgggccgtcggcggggcgagctgcggccgtttccggggcgcccattgctagggccgccgttgccacggacgcccgccctgcgcccggctccctctgcactgcgcggcgccatggacgacctgcgggtgctgtggatgcgcgaccgcgtgtatgcggctttcggcatcaccgacccccagcttttcgaggacctgctcaaccgcgacgacggccagggcgaggacctcatcttgcacttcctcaaccaggcgagcgaggaggaggggccctcggcgctcttcatctaccgcactatggtgccggaggaggtggaggtggagattggtgagcctcgacgcgccgctcccttccccgggcttccctcctgcccgtcccggcctctccggcgggcgccggggctgctagagcctgcccatcgtccggccccggcctcaggtgctgtccacaaacgctgccgcccgccacgtgcaggccccgggcgaacccagcaatcacagccgtccctgccctcctgggcccacagcccacttgaaagtcaggccttgattgaaaaatcacagcaaacactgacttagcccgcaccccgtgccaggtgcggttccaacgcttgtatcaactccttaaccctacgaggcgggtgtatcctcatccctattttacagatgagcaaactggcacggagggggttaagtaacctgcccaaggcccacggggcgtcaagatccactgtgcaataatccgaacggctgggtagagccatgcccaggtgtggcagggacccaggtcactgtcactctccttgacggtcgcagcctctcacggagggtccgaagagcacccctttctacttctggaggctccttatatcctaaaaagtaaaataaggctaggacaaagtttaaaaactacagtagactttaaatgtttatgttgaacaaattagcatcgcaaatacaaaaagacagtgaccagggtcccagaaccctctgtggaggcggatccccagccccacctactctctgataggccagggacactgagagggcagggaggggccagcacaggtgagaggaggaggcaggacaactcgcttcagaaacagctagaaggagactgggacctcgaaagccgcctcctcgcaggagcaccagctggagcacagctaccgggacctcctgcctggctgtccagtctcctgggctacttttccagccccttaaggacttggggatcccttgcagggcctctcactgggttcgggtggcagggccggcagacctttgattttttttttaaaggtaccaggcagattcatttattgtattctattttttaactttttttttttttttttttgagatagggtctcactttgtcacccaggctggagtgcagtggtgcgatcttgactcactgcaacctctgcctccagggctcaagtgattctcccacctcagcttcctgagtagctgggactacaggtatgcgtcaccatgcctggctaatttttatatttttggtagagacaggtttcaccatgttgcccagggtggtctcaaactactgaggtcaagtgatcctcccgcctcggcctcccaaagtgctgggattccaggtgttagccatctggcacctggccacttcttttttttttttttgagacagagtctagctctgtcgccaaggctggagtgcagtggtgcaatctcggctcactgcaacctccacctccctggttcaagcaattctcctgactcagcctcccaagtagctgggattacaggcacccatcaccatgcctggctgatttttgtatttctagtagagacagggtttcaccatgttggccgggctgctcttgaactcctgacctaaagtgatctgcccacctcggcctcccgaagtgctgggattacaggtgtgaaccatcgcgcttggccaccttcatttattttaaatattcattatttgcttgcacaaaataaaacgccttcatcataaatccaaaaccataaataaacaacaataacaaatccctagtgccatctggagagaggaccacgtgatcacgttttggaatttaaccttccagcctattatttttttctccctggcagacctttggacctgaacattagattataactggacctcggatgtaggcactttcattggcaccaagtgaaattatggaaaccaaaaacacactcgcaggattgaccgtttaacatgtaccaccactgcaggaactcgggtttcgtttacattaaaaaaaaattacaagaccctaaaacaatggatgtgacttggatttcttgcagaagccctccaagggcctctgttaacggtggggtggctgttgtctgctgtgtttactagcacgtgtttagcccaaatgtcatccagtgtggaagcagagttcagtctcacctcagagggtccccctggttaattcctggaccctccaaagggagctca

SEQ ID NO: 93942 - DNA, 61869 bp, Homo sapiens
  misc_feature (1)...(61869): n = A,T,C or G
ctatccttttctctgtgcttcatctgtggatcacaaaaaccgctactccgaattaatccactattccaatgtttctcaaatttaagagtcacctgaaggcaagagacagtgttggtcaaaatgtagttcctagctgggcacatgcacacctgtaatcccagctactcgggaggctgaggccagaggatctcttgagcctaggaaaggagtttgagacccctgactttaaaagaaaaataaggctgggcacggtggctggcatctgtcctccctctgcctggagaaagtccttttcctctttagaataagtaggtacaagatcaggtgcttgagggagcaggggggctgtcactgatgcccggaagggggcagatgctgcttttcgagcctctaagtcagcgtgggaattccccaaacccaccaaggtggaagctcgctggtgtcctctgcaatgtataactgccaccttgtggggtttccatactgcttctaataattgcaagatttcttgttgatattttatgtcttttcccccagagttcaataggcccttttctttatataatgctccatgcacttgaagggttaaaaaggcatatcaagagtcagtgtaaatgtttacagtcttaccttcactgagttctaaggcccgaattaaagcaatgagttcagctttctgagctgaagtgccctggggcaacgatctggcttcaacaacagtgtccagagttaccaccgcataccctgcaaatctctctccttgtgggttgataaagctgctcccatccacgtatagttcccagtctactgatgcccaaggctggtcccggaggtcaggtctgctagagtaaactgagtccaacacttctacacagtcatgctcaacagggctctctgatactgggaacaaggtagcggggttcagggtgttacaaacttcagtggttatacggggattttcacaaagcaaactttggtacttagtgagtctagcactcrttagccaatgatgtcctttagtattcattaaagtcaccacagcatggggggcctttatgttccggttttgcccaagagtcagcttatctgcttcttgtactagcagggcagttgctgccaaggccctcaaacatgggggccatcctttaaaaaccccgtctagttgtttagagaggtaggccaccggcctcggccagggccccacagtttgggttaaaactcccaactgccatcttttctctctctgacacatacaatgtaaaaggctttgtcagatcgggtagccccagggctggggctgacataagtctttcctttaactcatgaaaggcttgctgttgctgggatccccattcaaaaggttcccggtcccctccccctttgtgacctcatacaaaggcttagctaatactgcaaagtttgggatccacagtctgcaaaaccccacagcccctaagaattctctcacctgccttctggtcttaggctccggtagattacaaatgacctgctttctttctgatcccaggctgcactccccgtcggatagtaaatcccaagtaacgtacctgctgttggcagatctgagctttttttcttggacaccttatacccacagtcctccaggtgccggagtagagcatctgttctcttggcgcacccgactgccgtggggtgtcccagcaaaaggtcatcaacgtactggagcaacacgcagcctaggtctctggtgggaaacttctggaggtctcgagccaatgcctccccgaagatggtgggggagttcttgaacccttggggaagccaggtccaagtgtactgagtagtgacacctgactccggatcttcccactgaaaggcaaacagcttctgcctctcaggggctaatctgatgctaaagaaagcgtctttcaggtccaagcaggtgaaccagctgtcctcagctggcagcaaccccagcaatatgtacgggttaggtactgttggatgtaaagtcactgtagcctgattaaccaagcgcaaatcctgtaccagcctgtagtccttggtcccaggcttgggaacaggcaggaggggagtgttccatggagactgacaaggaactataattccaaaggttcttaggtgcttgagatggacctggataccttcaagagcttctctggggaccaggtactgtttttgcctaaccggctgggccccrggcttaacttctataagtacgggggcttcgttgactgccaaccctggaggttgtcttccgcccacactcttggccaccgcttagccagagctggtcttatctcttggcccggctcagttaacaaaagtctccattcctcctctcgggggaccgtaagggtcataatgactcccgttccgggtaactttagcagcaaagagccgtgctctgtaaaagagatagtggctctcagtttgctaagcaagtcccttctcaacaagggcaagggataatcaggcatgtacaaaaactgatgaatcactttatgtcttcctacagtacaagtccggggcaagcagaaagcttgttttgctgaaactcccatggctccgatgatgtcaatagtctttttggataagggggcgactgggccggttactaccgaatgttcagcaccggtatctataagaaaatcaatgtctttacccccaactgtcatcctgaccataggctctttgggagtccttgagcccggtccccctcagtccaataacccttctgccaggttgagcagggccccttcctccttgtctggagcctcctgctccgagtcaccttgttttccttttagctgagggcatttgttcttccaatgtcctatttctttacaataagcacactgattacgctgcaagctctgacagccaggctgagtttctttcccggggccccccttcccttgcctttttgtgggagatccctctaattgctgcagctaacagctcggcatttcgccgggcctgacgttcattctctctgcggttttccttacggcttactgcatccctgtttacaaacacctggttagctatttctaataattgtgatgtgttcatccctgcaaacccagcctgtttctgcagttttcttctaatgtcttctgcgctttgactaactaaagccatgttaatcatgcgttgattttcagggctatcgggatcaaagggagtatacatgtgttaggcctcacacagtctctcgtagaattgtgctggactttcttcttttccctgaatgacctcagagaacttattaacgtttgtggccttctgggctcccctctaatccttctaagagagcttccctgtatcggtttagcctttgcatatcctctctttcatttgggtcccactgggggtcggttcccggtaactgggtccttacatactcttgggggttttggtaatcagccggtgcatgttcccctagccacttagttgctgcttggagcactctccgcctttcatctgtgttaaagaggaacatgagcaactggtggcaatcagcccaagtggggttatgggtctggataatagtttggagcaaatcaattagagcttgtggcttttcagtacaggacggggtattgtttttccagttgagaaggtcggcagaggtgaagggctggcacacaaaaacacgcctctccgccatgtgcccatcctcatctattccagtataccgctgctctctcaaggacatttgtatccccgttttgggtcttaaacgagctgccaagggaggggtttctcctgaggcttcacctcctctcttgtctactctgggtggcctagggatatgtttgtcttgcggaggcacaagcactgtggactcaaaagtggggagcctctctccctggtaaggggagggcaccactgggatgacttttgccatctcctgcaatggatcatctgatgttgggtcgaacagaacttcaggagttgatttccctcggtgggtggagcgggatccttccttgactatctgtccctttgctactagcactgctgctgcctgccctcttacccactgtggtaaccaagtgtctatgtatggaaactggtctgagtgtcctgacttaccagttaccttgtgccataccttagaaacaagggacctgtccaggcttccttctgatggccaacccacttctaatgttggccaatctatttcacacaaagttctaagtttccctggtgtcatagtaaccccatagtcgccattaaatcccttcttaaaatttttcaacatagttcctagaggagtaggcttattttgtgtctgacctgtgtttcctcaagacaaaacaccaagctcacaccaaacgcacaccacaaaacaaagaatgggtaaaaagggcacacacgcactttttcagttttcaccaaaccagaatcaaaaccaaaatcagagtatccagtaatccaagccaggtcaaaccaaaaccaaagtgtcaagcaattcaagtcaagtcaaaaacaaaaaccaaagtgccagtacaggcacgccgtgggtgatcaggccatgcttccactcaaatggagtgggcaagttccgaagaccagtcttaccaagtttcaaatgtccggactccaagtgcctgttccttcccggtgttcagccactgcgttgatactccacgggggcctgccacgcactgctctgactaggcgttccaccggggcaattgcctacccaggagcgctcgcaggatccgcgtcgctcaagctggcgggagttccccgcagggatgctccacagggcaggcctaagccccctaaggggctgcctcgactgtccgtcaattacctcgcttcccagtcagggaaccaagaaatatagcaggatgagtcacagacaaaactcctcagacaccagattaaagcaggaagaggttttttattcggccaggagcgttggcagactcgcgtcttgagagccgagctctccgaaaaagaaattcctagcccttttaagggcttacaactctaaggggtctacgtgaaaaaatcataatagatcaagtaagcgtgggaaacgtgactaggggctatatacatcagctaacagaacaaaaagttttacagtgctttctcatacaatgtctggaatttacagataacaccaatagttttggtcaggggttaataatattattattatcttagccaccagggccaggtggtggtgccaaggtcgtctagctatttatcttacttctgtttctttccaactttttgctttctcccttttctcctgtcttataaactagggaaaaggggaggttggggagaaactgagaaggacaacaggagaagtggtgacctcataccataatcctagcattttgggaggccgaggtgagagaatcgcttgaggccaagagttccctaccagtcctggtaacatagtgagaccctatttctaaaaaaaaaataaaaataataaaaaaaataaaaaaaaaattaaataaataaataaataaattagctgggcgctgtggcgggcacctgtagttcccagctaccgggaaggctgaggagggaggatcgctgcttgagcacagtaggtggaggctgcagtgagcagagatcgcatcactgcacccctgcctgggggagagtgagacccagtctcaaagaaaaagcaagaacaaacaaaagtggtctctggaacaaacctggacaaacaacccttcgaatagaggcaaatttctcttcctggagaagccgtgccactggcractccccagggggccagctcgggaaaagccagctgaaacgagaggacgttcaccgttcctcgcctcgatccaccggacttcagaaggctacacgcggcaggcgccgctcgggatccaggggccggggtgagaacggaggcggagaaacccctcaggctccgccaccggggcggggaactgggaggcggccccgcctctgggcatcctcctgggtcttgcctagcggcgggcgcatgcttagtcaccgtgaggctgcgcttgcccggggcccgcrcccccctaccccggggaccgmccccgggccgcccgccccacttggmgcgccacttccgcgtgcatggccctgctgccccgagccctgagcgccggcgcgggaccgagctggcggcgggcggcgcgcgccttccgaggcttcctgctgcttctgcccgagcccgcggccctcacgcgcgccctctcccgtgccatggcctgcaggcaggagccgcagccgcagggcccgccgcccgctgctggcgccgtggcytcctatgactacctggtgatcgggggcggctcgggcgggctggccagcgcgcgcagggcggccgagctgggygccagggccgccgtggtggagagccacaagctgggtggcacttgcgtgagtaccgccggtttgttcgggcggggggcgcctctttgtctcggtctttcgggggacagcctgtgctcgttcctatggcgatcctgtcccccggcgctgsgctttcctcttttccaccccygcaactccccattccgaagccaggaacccagcaggtggagragagagaggcgtccgggggcttctctgcggcccgcaaagccgagccagcgtctgcttccgcacggatgcgatattgaccagggccggggcgggttagattaaccttcctccatcctcacttgtccaagtgggagaggattggattctgttcttgaccgcgtgaaacacaaaactgcatctgggaacattgctggtggcctgtgtgtagggacgagggtgacggtgccatagatcctggttcttgaaaaatgtagatcctggttctcccgtttcaagggcagaatgatttatagcggttgttgtcaaccttggctacacattcgaatcacctgagggtgcctggattcccgacttaattggtctgaggtgcacttgggctttgggatgtttcccgacttaattggtctgaagtgcagcctgggctttgggattttcgggtgatctgaattgcagccaaggcgaccttgagtaggtgagttctcagagcttttgttttgtcttggttttatgtggattgcaaaactaaaaacagagggatgtaaatcctgagatttacaaaattcataatttttgaaaataagggtttttgtttgtgtttgttttttgagacagggtcttgccctgtcacctaggctagagtgcagtggccatcatagctcactgcagcctcgaactcccgggctcaagggatcctctcaccttggcctcctgagtagctggaactacagggggctaatcaccacgcctagttaattattattattttttgtagagatgggggtctcgctatgttgcccttgctgatttcaacctcttggactcaaccgatcttcccgcctcagcctcccaaagtgctgggattacaagcctgagccactgcacycattctaaaaataaatgttgtttccaagttattggtgtgcccgcccttttctatcacaagatttgggtgttgacgattaaaatgctgtatccaagaggaacctgggatttgggataggttctctaaattcctttggagatgaatatttaaattatgtcaaattgggagctctttaaggacagggatgggcttctgtgtttgtgtgtctcttatcaccttaaaatcccttgctcaataagcacttgtgcaatraatgaaactaaaaatggacagttatgaaaaggttgacttcattgttcagtgccttggagatgaacatggagatgaagagaaaggaaaaatctctgttaattatcaacttgcactttgacaccatagtccagacagaaggttagaaatctgtctctccagaaggcagattgtggggtgccactaagtgcccccctcccacacctcatgagagtacttgatcacttctcacttctgttctgctctccacattttctctgtcttcctctttctctacttatgttataatgtgcttcagaggttcacccactttaccttcctgttatgaattctttttttttttttttttttgagagggagtctcactctgtcacccaggctggagtacagtggtgcaatctgggctcactgcaacctctgcctcccaggttcaagcagttctcccgtctcagcctctcgagtagctgggaatgcaggtgcatgccaccatgcccggctagtttttgtacttttaatagagatggggttttgccatgttggccaggctggtctcaaactcctgacctctggtaatccacccaccttggcctcccaaagtgcttggattacaagcatgagccaccacacccagctaattttttatttttaaaatgtatttatctatttttttttcgatatggagtcttgctctgtcacccaggctggagtgcagtggtgcaatctcggctcactgcaacctccgcctcctgggttcaagcaactctcctgcctcggcctcccaaattgctgagattacaggtgccactacacccagctaacttttgtatttktagtagagccaggctggtcttgaactcctgaccttgtgatccgctcacctcmgcctcccaaagtgctgggattacaggcgtgagccaccacgcctggcctgtttttattttatttattgttttttagaaacagggttttgccatgttgcccaaactggtctcttatgcctgtgcttaagcagtcggcctgccttggcctcccaaaatgctgggattacaggcatcagccaccactcctgtcccattttttgtattttaagtgctgggattgggggtgggtagggagaaaacgatagatataaacatttgtgagacatgtcccttcccttaaggaattttgtggttgtgaaagaaaaaaatattggaaccccaaagtatgccagaaggaaagttcagcttgggaactgaatcacacaaatactgcttttccttttgttcccaaacagacagctgtaatttcacaatcccatgtcatagccttatctcctctactcctgcttttcacttttactttatcttatgtaaaatgtagatttactgaggctcataagaacctcacaagaatgtawccatctaggctgggcgtgatggctcacgccagcactttgggaggccgaggtgggcagatcacctgaggtcaggagttcgagaccagcctggccaacacggtgaaactccatctctactamaaatacmaaaattagccgggtgtggtggcacatgctacttgggaggctgaggcatgagaatcacttgagcccaggaggcagaggttgcagtgagccaagatcatgcctctgcactccagtgtgggcaacagagtgagactctgtctcaaaaaaaaaaaaaaaaaaaaaaaaaggtggggggttgggtagtattctttgacattcgsaacctcaaaagatgggtcccaggcctaggcatcaaaacgggatatgttgtgtaatcaaatttggagcacagagtgtctctttaatagaaataagagatgagaagctgatgggtaggttgtggtttgaaaaatgtggagtttctggacacacagtgaactatgggggcaggggygggtttgagcaaaccagtgactcagtgaaagtagttttgtggtaagccataggattgagatctcacccttggcgatrcccaatagaagttwgtctttctgtctttttctttttcttttcctttcagtttatagagatagggtctcactacattgcctaggctggtattgaactcctggactcaagcaatcctcctgctttggtctccgaaagtgttaggattacaggcgtgagccactgtgcacggcagaagtttaagaytggttctcccatgagttctttcctaaataaaatccattaatttctaacgcttggggaagttttaaagttgtggtgaatgaactcacacggaagkttcaaattagaatgtgtgtctagcagtggtcatttacaggtagtgagattggttggtttttcattgttttatcagtgttccttcatttaattgttcaaccgttaaagtttatgggaggccattgttttggaccagtctcctgtactaggtcccagcagacctgggkgtgtgtgtgtgtgtgtgtgtgtgtttgttgctctgtcacccaggctggagtgcagtggggtgatctcggctcactgcaacctccgtctcctgggttcaaggaattcatgtgcctcagcctcgtaagtagctgggactacaggcgcaggccaccacgcctggcaatttttttgtatttttagtagagatgaggtttcaccatgttggccaggctgatcccgaactcctgacctaaagtgatccacccgcctcggcctcccaaagtgctgggattacaagtatgagccaccgcgtctggcatgttgtttcatttttaagagacagggtctccctctgtttcccaggctggagggcagtggtgtgatctcagctcactgtagcctcaaactcctgggctcaagcgatcctcccacctcaacctcccgactagctggttctgcaggtagataccactgagccttgcttgaattcagcatttcaagtctccaaaaggttaagtatattgcttatctcatgatctcgtgtagactggagagaaatgcaaagatcgcccaaagtcaaggtgaattagagccttctgggagctttgcctctgtggttcgcttctctgcctacacaygtgatgggagagtcagcttaaggaaaagttgtttctaaattgctgctccctttgccccagggcctggggaacttgcggtcctgggttcctgctgagtgtactgattctgtgatragaataacyaggttcytgtggttttggcgagtagtacttaccaatgagagttgggtagtaagggttgatcatgtgacaaaagttcatgattgccaagtcacagtgaactatgctgcacagcagcagttggagaggcctaggggagagagaggtaggggctttgaaagatcagtgaacagcaggctgctcagtgaatcattgttcatctaggctgaaaacaattacccagcaacatgtaaatcataacctcatttggaagtgatactgtgtactttgatattatgatgtctataccctgrtaaagctgaacactggacatgctttttttttttttttgagacagggtctcattgtgtcacccaggctggagtkcaggggcatgatcatagctcactgcaaccttgaactcccaagctcaagtgaccctcccacctcagyctccccagtagtcaggaccacaggcacatggccaccaccawgccctggctgattttttaaatttttagtagagacaaggtcttgctttgttgcccaggctrgtctcgaactgctggtctcgaactcctgagctcaagcagtcctcccaccttagcctctcaaagtgctgggattacaggcatgagccaccgtgcccagcctgaacatgcattattaaatgcaatttactaaaaggaggtcagtttaaaggaactctgtcatcagttcctgcaatattgacagatagccctccgaaatagaaggttaccctaatgtgtctcctgggtttagaatttcatagaatggggcccacccatattcataagtgacaaataaaggagtggccataaagggtggggctagttaaarcaagcaaatgctattgttgaaatttggcttttaacttaccttgttgactgcttcctttttttgtactagtcttcatatactgttgctttgccatctgcctcaaaacccactaaatctgcagggctaggaaaagatagactgcctctgaatccttcagggtgtctatttctttgtaaaacatactttgaaaagtaaccacagagaatgcttttttttttttttgagacagagtctggctgtcacccaggctggartgtagtggtaccatcttggctcactgtaacctctgcctcccgkgttcaagcgattctcctgcccagcctcctgagtagctgggactacaggcgtgtgccactacacccagctaattttttttttgtagagatgaggtttcaccacgttggccaggctggtctcgaactcctgacctcaaccgatccacccacctcggccttccaaagtgctggrattatagaaatgagccaccgtgtctgtccaagaatccaagaactttttttatagagggaaactaaaggaatgatatggaaatactgataccctttggcttttttttttcttcttgacacgaagtctcactctgtcaccctggctggagtgcagtggcacgatcttggctcacggcaacctccacctcccgagttcaagtgattctcctacctcagcctcctgagtagctgggattacaggtgcccgccaccacacctggctaatttttttatatttttagtagagactgagttttgccatgttggccaagctggtgtcaaactcctgacttcaagtgatccgcccgccttggcctcccaaagtgctgggattacaggcctgaaccaccatgcccggaccactttggcatttgtaagtggcttccagtcagtgagaattcattaccttctattcactaggtgttgcaacattaaatattactgcagttacttttgcaccagcytaataggatgtggaggtcctaggtccttttctttttgggggacgggagatggtgggtatcaggtaatagtggggactgacatccagaagagttgtctcacaaaactcttcttctccccggatgccccagagtaacaattatttttattttttaaatttttttgttttttgaggcagggtctcactctgtcgcccaggctgkagtgcagtggcacgatcatggctcactgcagcctcaatatcctgggttcagrtgatcctcctgcctcagcttcccaactggctgagactacaggytrttatttgtggtgatggggtctcgctgtgttgtccaggctcctctcaaactcctgggctcaaaggatcctccagtcttgacccgtcaaaagtgctaggattacaggtgtgagccacggcacccagtcacactttttaaaaatctggtgatttcctgagactggaaggttcaggttaatgttctgcttagctaagaattgaacaaaaacagcctttgttaatatctcttgcaaatgtatccattgattttcttgctttagattctgctttacacagactgcttttttttttttctctttttctcaagyttgatgcctccctgaactaaccttcatctgaaatgaaaaaaaagactttgaaggtggagacatggatattgaatagtgaatatgtgccagggacagggccatgtccagacagcattatatttagtcatggttggtgtaaagctgatgaaatgcaacagagacagggatctttatctgtttaagtcatcagtatagtccaagcccctagaacagtgttttgcacatagcaagtactcagtatatagttgctgaaataattgagttgatraatcgatagtgttttgccttggaaattatgactcgtctattttctgagtagttctcattctggtcttgaattagattttaggcagcaaagaaggacgacagagggaggaaactgtaggcaattctgtggtgggaggttgtggggaaccagaggaaggaagttaacaatttttttttgagacagggtcttgctctgtcacccaggctggagtgcagtggtgcaatatagctcatggcagcctcaaactcctgggctcaaacgatcctcccacctcagcctcccatgtagctgggactacaggcgtgcaacaccacacccggctaatttttaaattttttatttgtggagacgaggccttactatgtttctcaggccggtctctaactcgtgggctcaagcagtcctcccacctcacctcccaaagttttgggattacagygtgagccaccacacccagccgsaagttcactattgaacacagttgatgttcttggcaggcgcaattgcagattaaccaagttcttgttttactgccaacatgggcaatgtgaagtttctacctggctaggcaggattgaaggtaacgaggcaggccctaggaaaaatggtgaagcttctgaattttgccacctgttatcaccagataacaggcggcccactgatcgggattctgaacactagattgatgccagcaggcccactgatcgggrttctgaacactagattggttggaaaaggaagctctcaggaatggatcatcggtttggaaagggaggctgagttacaggagtctccttgatgatgtatttactgaacggcctgtgaaattttgtttcttagctgggtgtggtggctcacgcctgttatcccagcactttgggaggctgaagtgggtggatcacttgaggccaggagtttgagaccagcctggtcaacatggtgaaaccccatctctcctaaaaattcaaaaattggccaggcgcggtggctcaggccagtaatcccagcactttgggaggccgaggtgggcggatcatgaggtcagtagatcgacaccatcctggctaacatggtgaaactccgtctctactaaaaatacatwaaaaaaaaaaaatttatccaggtgtggtagtacacacctgttgtcccagctactcgggaggctgaggcaggagaattgcttgaacccaggaggcagaggttgcagtgagccgagatcgcaccactgcacttcagcctgatgacagagtgagacctcgtctcaaaaaaaaaaaaaaaaaaaatttaaaaattagctgggcgtggtggcgggcacctgtaatcccaggtactcgggaggctgaagctggagaattgcttgaactcaggaggcagaggttgtgatgaaccgagatggcaccactggactccagctgggcaacaagagtgagactccatctcaaaacaaaacaaagcaaaaaacaaaacaaaacaccttagcagggcatagtggtgcgtgcctataatctcagctactcgggaagctaagaatcactggaacctgggaggcagaagttgcagtgagctgagattgtgtcactgcacactccagtctgggcgacagagtgagactctgtctcaaaaagaaaaaaagaaacttgtttcttatccctcattaatgcccacctggagaaccggggaatctgccagtsttgtatgctgagggtcttagcaatgtgcaactctgggcaaccagagccctgagaactcatctgataatgctccagtctgggaggcaaacttcctttgtgatcagctgatgtgttttaggtaggaaggcccctggggaatttatctccgcctttccgtatgccttgtgtgcgtgtggggagccagcagacgcagaaataattcagaggtatcagagtcaccatcacatctatcatagattagaaatagatgctttatataccttatctctgacctgctcaaaatctccataatggaagcattcttcccttaactgagctaggagaaatttggaaactcasccacctctagccactaaatgggagagctgagagtcaaactcctatctgtctgacttgaggcctgtgctccctctracaacctgatgcacaggtcagctagagcagcagtccccagcctttttggcaccaggaaccagttttgtggaagacaatttttccacggaccagcagtggggtatggtttcaggatgattcaggattcaagtgaatcacatttatttatttatttatttatttatttatttatttttatttttttgagacagaatttcactcttgttgcccaggctggagtgcaatggcatgatctcggctcactgcagcctctgcctcctgggttcaagcgattctcctgcctcagccttccaagtagctgggattacaggcacccaccaccacacctggctaatttttgtatttttattagagacggaggtttcaccatgttggccaggctggtcttgaactcctgacctcaggtaattgcccgcctcrgcctcccaaagtgctgcaattacaggcttgcggcaccacgcccagcctgcatcacatttattgtgcactttatttctattattattatgttgtaatatataatgaaataattatgcaactcaccataaactagactccgacggagccctgagcttgttttcctgcaactagttggtcccatctggggctgatgggagacagtgacagatcatcagcaattagattctcataaggagtgtgcaacctacatcccttgcatgcacagttcacaatagggttcacgctcctatgagaatctaatgccgccactgatctgaaaggargtgggtggagctcaggcagtaatgctagcgacggggagcagctataaatacatatgaagcttcgctcacttgcccgccactcacctcctgctgcagcctggttcctaataggcacctggsggtcagggagccctgagctagagaaaggggaaagaaggctgagtgcggtggctcatgcttgtaattccaacttttgggaggctaacgtgagaggactgcttcagcccagcattttgagaccagcctgcgcaacatagtaagaccctgtctctaatgtgtttgtttgtttgtttgtttgtttcctttttcttttgagatggagtttcgctcttgttgcccaggctggagtgcaatggcacgatctccgctcacggcaacctccacctcctgggttcaagcgattctcctgcctcagcctcccaagtagctgggattacaggcatgtgctaccacgcccagctaattttgcatttttagtagaaacagggtttctccatgttggtcaggctggtcttgaactaccgacctcaggtgatctgcccgcctcggcctcccgaagtgctgggattacaggcataagccaccatgcccagcctccgtctctaatttgtaagaaattgaaaaaaaaaaaatttggggggaaagagaagggagcagcagaggggatgggtgagcgagagcatgccagcttttcacccctggcctccccagctctcactggaactaagtgtatgtgtattttttgagatagggtctcattctgttgcccaagctggagtgcagtggtgctatctcggctcactgtagccttgacctcccaagctcaagtgattctcctgcctcagcctccccagtagctgggactacaggcttcactatcacmcctggctaatttttgtattttttctagagacagtgtttcaccttgttgcccaggctcatcttgaactcctggcctcaagcgatccacctgccttggcctcccaaagtgctgggattataggcatgagccgccactcccagcctaaatgtgcttttcgttccttccaagtcagaggcgctgaagtcatgtcatgttgctggcatgtaaataggcctctaaaagcagtggaaatccctggaggcctgttcacaggagctggcaaaataggacagtggtatttcagggtcataggcttcctttcaaccagtgccccaggccccaaagtgtgttgtgmtggggcgcagcttctctggcccaacaaggccacaattttccaccatcctcttcctctggtttctggcccagtgctcttcaattttagggaatgtggagattctkctgctgccccttgagtcagtatcttggacaggctcagagcctctctctggctggcactgtaggccaagatactgatacagtccccaagagcagggactgtatctgtttagtgccttaccttgcataatgcctggcacaagtgagtgcttactcagtacctctgaatgaatgcctgcaagctaagacgacgtagaagcaaaaaaggcagaaacttctaaaaaaacaaaccagagttatagacaccaggcaccagtgaaagcccwccttggygcttagaagaaacatattccaaaaaaagaatatgttttaaaattaaacatattttttaaaaacttttttwaaaaacatatttttaaaattagaaaaagaagccttaaataactttaaagtagcttcaaatatacatgaggaacaaactgatggtatgtgagagtagtttagaacattgagtgctttatgacacccttggattgcttttgatgattcttgggaagccagaaatggtgactggaagaccagcagtatttatgtagcagacaaatcatctctacctttgggaaaattgcttttggagtctgtcctagttgaagccacttagtgaacttaaatggtgaactgcagggtataaaggtgtgggtggaaggcacggggaagcacgttgcctgccaaataactggaaaaggcaggttggatgagaaaatcattcccattatggggctagcattgttcttcccacagagtttcgacctcctttctctgctcttaccattaggaaacccctgctgtgcgtcctcctttcttagaaatggcttattctatttatcccagtaatgttgtcaggtacttgggggttgagaagtagcatatcctcagcttggccagatgaaagggcactctagatagaaagccatacgtttattattattatttatttttagaggtagggtctggctctgttacctaggctggagtgcagtggtatgatcagagcttattgtagccttcaactcctgggctcaagagatccttccgcctcagcctcctgaatagctggaactacgggcatgcaccaccaaacccaactaattttttattttttatttttttacagagatggggtctcagggtctcactgtgttgcccaggctggtccctaactcctgggctcragcaatcatctttcttttcggcctcccaaagcgtggggattacaggcgtgagccaccacacccagcccataaattattctaatttttagtatgaagtacttgtgatactctgccatgaaggatgcagtgctggcaggaatagtggaataattgctgcttgtaaacatttaagattctcctgtggattttggtgagtgatcattaaactgttttccaaaagcatatacaggccaagcgtggtggctcatgcctataatctcagcactttgggaggctgaggcaggagaatcacttgatctcaggagttcaagaccagcctgggcaatatactgagaccttgtctctatttttataaagtatttttaatttttatttaaaaaataaaataaaaagcatatacaggccacgtatggtagctcacacctgtaatctcaacactttgggaggccgagttaggaggattgcttgagcccaggagtttgagaccagcctgggcaacatagtgagaccctgtctctatatttttagaaaaatattttttatttttttttwaaaagtatatccaggcgtgatggctcacgcctgtaatcccagcactttgggatgccaaggcgagtggatcacttgagctcaggagtttaagaccagcctgggcaacatggtgcgactctgtctctactaaaaataccaggcatggcggtgaacgcctgtggtcccagctactcgggggctgaggagggagaattgtttgatcccggggagcggaggttgcagtgagctgagattgcaccatggcactccagcctgagtgacagagcaagactctgtctcaaaaaaaaaaaaaaaaaaaaaaaaaagcatatagaacaaaatgtgaaagttttctccctctccagagaaacactgttgactgcttggagtatagccaaactgtgtttacacccatatatacatacacacatactgcatatgaatacgaattgggttgtggcataactactattctgcaactttctttttgatgcataacagtgtatgttagaactctttccatatagtgcatagaaatctaccttgcccttttaaatggctgcagaatattccacagactcaatgtataactatttactacttccctgccgatggatatttaacctgtctgtagttacccgttatcaccaagcttcaaggaatagccccataaatgcatctttggacacgggagcataatatgtgactacttttctaggttactgtaaaagtagaattgctgggccaatcaggatatgtttgctaacactagttatagtcaacctttaaaatttttgccaatctgacagatgaaaaatatttcattatttaaattatcttttatctttacttttaaaaaatgtagatttcgtctgggcgtggtggctcatgcctgtaattccagcactttgggaggccaaggtgtgtggatcacttgaggtcatgagttcgagaccagcctggccaacaaggcgaatccccatctctactaaaaatacaaaaattagccaggcaggatggcaggcgcctgtaatctcagctactcgggaggctgaggcatgagaattgcttgagcctgggaggcagaggttgcagtgagctgagatcttgccactatactccagcctgcgcgatatagtragactcagtctcaaaaaaaaaacaaccaaacaaaaaaataatgtagttttctggctgggcacagtggctcatgactgtaatcccagcactttgggaggctgaggcaggtggatcacctgaggtcagtagttcgagaccagcatggccaacatggcaaaaccccatctctactgaaaatacaaaaattagctgggcatggtggtgcacacctacagtcccaactattcaagaggctgaggcaggagaatcgcttgaatctgggaggtggagtttgcagtaagctgtgatcgcaccattgcactccagcctgggcaacaaagcgagactccgtctcaaaaaaaaaaaaaagtagttttctgagtcttgctttttctacttttattccataagtgtatttctatatattaactaagagtgaaatggaaatgattgtaaccaaatatgtatttgtacataacatgataatctgtgcatttgtgcatttcgcttttctacatctttggttacttctttaggccaaatgcctagtagttataaatcaaagtcattttatgagmtctaatatttatttaggttttctcaagtttctgtactaatggttaatcaatatcctaagttccatgccatgtactttaaatttttgtgcttttggtgagtattcaccagtatctcaatgttcagcctttctttgtgtgtgtgtttcttttttgaggcagagtctttcagtgtcacccaggctggagtgcagtggcatgatcatgatcatggcttactgcagccttgtctttccaggctcaaagggtccccccacctcagcctcctgagtagctgggacyacaggcatgcaccaccacacccagctacttttttttgtagagacgtggtctcgcttgttgcccaggctggtctcgaattcatgggcttaagcaatccaactgcctcagctcccaaagtgctggaattacaggtgtgaactaccaagccctggcccatcttgggtgtttatccatgtattctgcagtactttcccgagaagtcctcttagacagcagctcaaatgggctgattgttctttctcygtccaagaaaaatgctgatgaatgaacttctctccctcattacagaaggaaaataatgttcttatctttttgtaacaaagaaagtaactagaatttagtacactgtgacttagaacccaaggaagactcctcgcttgatgcttagcgtgcatttcttgcagatttcgtttgatggtttgaattcaatattcttaaagtgtgtctcttttttttttttccaggtgaatgttggatgtgtacccaaaaaggtagaatttttatttctctttccctttacaatcctttttctatttggtaaatcataatcaaaatcagaatgtttccaaatagatcagttaaaattctttctgcaaaaaaaacccctagaccctactaaaagtagcttaagcaataggattgtttttgtttgatttgtgttttttaaatttttttatttatttttaattactttttatttttattattattgtttttttgagacggagtttcgttcttgtcacssaggctagagtacagtggcgcgatcttggctcaccgcaacctctgcctcctgggttcaagtgattctcttgcctcagcctcccaagtagctgggatgacaggcgtgcgccactgcacttgactgatttttgtatttttagtagagatgggggtttcaccgtgttggccaggctggtctcgaactcctgacctcaggtgatctgcccacctcagcctcccaaaatgctgggattataggcatgagccacagaccccagccaaggcctggtcatctacaccacaggatagttttttctcagcaaaaagacccagccagcaaaccaaactgttgaatggaatcttctcaagttctgtgggttcatggattttctgtatcacattagtgattttttcgttgttaatatctgtggtgcaggtcacattgaatgaattcattttttttacccttgacaaagaggaaaaaacagcagctcttatttgtaaagctgcctcttgcttatacttgcaaagaattttaccactcatttgaatgtactttcaacatatgttgtaatctcaagcttaccacctttattaatgacattccattttaacttgtcatctttttggtattatataagcaaatctcctaatctcatcagtgatgcatacctgagtttaattccaaaaagtctttttgaagtcttttccstggtataggtaaggtgtttttctttctgtcttaggaagacttttcttctctgggacattttccctcaactatttcctttcctattagtcatactttttgtaatctgttctacttggagccatgcaattatgactgtatgaattatataaattaattataaggtggttttatgtagtttaaaccagttatggtggtaaatttcgtgttgattggtacaagtttatttttttttaaatataccactgggctaatactgcacagtaaactgattttgtaatgktttagtctcatatttacttattccttctgatcacatgcggtagacatttatgtatgktcatttatatatwtttttttcttttttttcttttctttttttttttttttttttttttttttgagacagagtctcactcttgcccaggccggaatgcagtggtgtgatttcagctcactgcaatctccacctcccaggttcaagtgattctcctgcctcagcacaagtagctgggactacaggcgtgcatcaccatgcctggctaattttttttgtatttttattagaaatgagatttcaccatgttggccaagatggtctcgaactcctgacctcaagtgatctacctccctctgccttccaaagtgctgggattatagtcatgagccactgtgcccggccttgtgtttgtttctttttagtctgtttttaatagctttccccttatctctttaaaaaaaaatgttttaagttagcaaggtatagtagatkttatttattattattattattattttatcttttgagacagagactctgtcactcaggctggagtgcagcagtgtgatcttggctcactacaacctctgccctcagggttcaagcaattctcctgcctcagcttcccaagtagctgggactacaggtgtgtgccaccatacccagctaatttttgtatttttaatagagatggggttttgccatgttggccaggctggtcccgaactcttgacctcaagtgatccacctgcctcgggctcccaaagtgctgggattacagacgtgagctgccgtgcccagctaggtttgtttttaatttaaagggcagtatttttatctgctgttacctagttaccattcattcatsattccttttttccctcaggactgatttactgctgttttggatccttttttttttttttttttacaggtaatgtggaacacagctgtccactctgaattcatgcatgatcatgctgattatggctttccaagttgtgagggtaaattcaattggcggtaagtgtcaacactcagagggttcagtttccaagtgtagatatttttcttttataactgagccataaacttttttagggatggaggaggaattgcggtaaatattcacaatacgagatttacagtttagccatttttaagtatacaattgagtgccattaagcgcattcacattgttatacagtcgtcaccactattaccacttccagaacttttctgctatcccaaacagaaactattctattaaacaataacccctcattctcttctccccctggcccctgggaacctctattctgctttctgtctctatgaatttgccaattctagggaactcatataagtggaatcatacaatatttgttcctttatgtctagtgtattttgttttcacggtttgtccatgttgtagtatgtatcagaacctcattcctttttgtttgtttgttaagacagggtcttgctctgttgtccacgctggagtgcagtggtgcaatcatagctcactgctatcttgagctcctgggctcaagctatcctcccacttcagcctcctgagtagctgggactacaggcacgtgccaccatgcctgcctattttttttaatttttgtttttagtagagatgaggtctcactgtggtgcccaggctagtcttgaactcctgagctgaagtgatcctcccgcctcagcctcccaatgtgctgggattacaagtgtgagccactgtgcccagccttcattccttttaaaggcagaataagatttcttcatatggataaaaccacattttgtttatccattcatttgttagtgaatttttgggttgtttttaccttttttttttttttttttgagacggagtctcactctgtcacccaggctggagtgcagtggtgcgatctcggctcactgcacgctccgcctaccgggttcacgccattctcctgcctcagcctcctgagtagctgggactacaggcgcccaccagcatgcctgggtaattttttgtattttttttagtagagacgggatttcactgtgttagccagaatgatctcgatcttctgacctcgtgatccgcccacctcagcctcccaaagtgctgggattacaggcgtgagccaccgcgcccggcctgtttttaccttttggttattgtgaacaatgctgctatgaacattcgtatatgggtatctgttcaggtctctgcttccagtttcttttgggtctgtacttagaagtgaaattgccgaatcgtatggtagttttgtgtttaactatttaaggaactgctgtaaatcctttgaagccattaacagttttgaagaaatttagcaaatttatttatttagcaagtgtttattaagtgcccaccacgtcctrtgcacatcatgttctaggcactttgccaaaacatttctccttgtcttctgcgcagaaagaygatgccaactgagtgtgttctccactgagtggcacagaggcttttaacacatggggcagcagaatgacacagggaagggatgactgtcttcggagacattcactcactgcggttgctgttgacagtcagtgattctctgctcggggtgttcagggacagatgccttagttactaactagaaggggaagatcctgtttctgaatactgacttgggtttcattgcagtgttattaaggaaaagcgggatgcctatgtgagcygcctgaatgccatctatcaaaacaatctcaccaaggtgtgtatgctgggtttttaactttgagaaagagctgttcccttcttgagtactcagctaagtcttgccagactgtagccctatttatttatttatttttattattatttttttggagacagggtctcgctctgtcgcccaggctggagtgcaggggcgcaatctcggctcactgcaacctccgcctcctgagttcaagcaattctcctgcctcagcctcctgagtagctgggactacaggcgtgtgccaccacacccatcgaatttttgtatttttttagtagaaacagggtttcaccatgttggccaggctggtctcgaactcctgacctcaggtgatcygcccaccttgtcctctcaaagtgctgagattacaggcatgagccactgcrcccggccctattttatttttaacgaccaggtctctatctgtcgccaggctggagtacrgtggtgcaatgatagctcactgtagcctccaagtcctgggctcaagcagtcctcccacctcagtctccttagtaactaggactgtaggcatgcaccaccacacctggctaatttttaaaatattttgtagagatttctcactgtgttgcctaggctggtctttaaacycctgccttagcctcccaaagtgttgggattatagagatgagccactgtgcctggcctcttactttttctattattgaaattgacctgtcagagcagaagcctctgacctagatggccagtctcttctgcagagagagggtggcatgtgccagagctggcagaccaggcctcacctaatggctgcaccttgagtaggtctggcctggcaattagattcagaagtcacatacgagagactttgtgcaccagtataccagtttattaattaaaatgaggagtgctatctagctgaaaacctgccattgtgtgtttgtttgttttttgagacagagtttctctattcacccaggctggaatgcacaatctcagctcagtgcaacctctgcctcccgccaggttcaagcaattctcctgcctcagcctcccaagcagctgggattagaggtgtgcaccaccacgcctgggtaatttttgtatttttactaraaacgggatttcaccatgttggccaggggtctcgaactcctgacctcaagtgatttgcccacctcggcctcccaaagtgctgagattataggcgtgagctaccgcacctggccaaacctaccattgtttatttgcctagagtaagacctccttaagagaccaaattaggattcagaaggttgtttttatgaatgacatctgatcaagaaaactgggcagaggtgtgtttgcctccagcaactgtatgtcatccttcactaycctgatgcttttcccccatagtgctgggatgtcacacctttcccaccaggaccatgtaggtgacattgacaacctgtgcatcacttaactctccttttccttgacaatatcttcccgccacccttcatttgtctttgtggtctcactttgctgtttctaagatttcttacggttgtttgtttgtttgtttgtttgtttatttgtgaaacagaatcttgctctgtcgcccaggctggaatgcagtgatgtgatctcggctcactgcgacctctgcctcccaggttcaagcaattcttgtgcctcagcctcccgagtagctgggactacaggcacgtgcccccacacctgcctaattttttttgtatttttagtagagatagggtttcaccatgttggccaggctggtcttgaactcctagcctgaagtgatctgcctgcctcagcctcccaaagtgctgggattacaggggtgaacaaccactcctggccctcttaggttatatttagatcagtaacttttttttttttttttgaaaagggtcttactctgtcacccaggctgargtgcagtggcatgatctcagctcactacagcctcgacctcccaggctcaagtgatcctcctgctttggccttccaacatgctgggattacaggcatcagccactacacctggcttagatcagtagattcttgatgataattaggccactgtgatctcagtagcagcatatttataaaccaatttttaggacgagttacttcatacatagctaactgtrtacagttttatattcttattcattgggtttattttttggagggtgaattttccaaccttaatcctcaatccagggggaaaaatatttaaaggcctgcagtccttaagcacaggagattttaaggctgagtatagagtaacactggcagtactaaaacacaccaagtwttttatttttatkttttatttttttgaagtcaggatctcactctcttgagcagactggagggcactgtcgtgatcacagctcactgcagccttaacctcccaggctcaagcaatcctcccacctcagccccctgagtagcttgggctataagcactgtcccaccacaccctactacttttaaaaaacgtttgtagaggccgggcgcggtggctcacacctgtaatcccagtactttgggaggccgaagcgagtggatcatgaggtcaggagattgagaccatcctggctaacacggtgaaaccccagccctactaaaaaatacaaaaattgaccaggtgtggtggcgggcgcctgtattcccagctatttggaaggctgaggcaggagaatggcrtgaaccctggaggcggagcttgcagtgagctgagatcacaccactgcacyccagcctgggcaaaaatgcaagactctgtctcaaaaaaaaaaattttttttgtagagatgaggtcttgctatgttgcccacgctgatcttgaactcctggactcaagcaacccttctgccttgtcctcccaaaatatgggaattataggcataaaccactgcatctggccttttttttttttaatggagctgactgaaatacttttgcaaaagaggtaggaaaattattcaggaaccagcattttgtaatacttagaaatcttggtgtgtactatagcttatggtgatcttatggggaaggaattacctatagttgacccagaaattctatattgcaaaggaaactttctatctaatatcctggaaactgaaagtaaaaatctcactgcttcctcctctgaactagtgtctgtcctatcgccacgcgagccatactcctttttgtctagcattgcagatgaagtcattaagacctgagggaatggtgttctggaggcctgtggattttgtctttgaccttgattcagcttgattaagcctggcacctgcaggaacaggcctggagggtgcagggaaagaagaagataactcaattcagaatcaagcacgttccaatatgttaaagcattccactttgtaatcatgcttacatggttccattattcttgtaagttgaccacatttgcatgcccctgcatgtatcatggctrgcgaaagcgtgccagcagcccctaagtgaaggcctggktmcagaggattccagtaagagcaaatccaaaagtaagagtctgagttctcaccgtctccagcrtagaacttcagtgtcatgtacttttgtggtattcttcccattttacgaaagcacaagcattgcgtttccctcccttggccagagtattcctctcttgctcttgcctctgttcatttcaccattatcctgttgtctttcttagccttctgcctctcctccagacacaccagtctttttgagagagggtcttgtctctgtcgcccaggatggagtgcagtggcgtaatctcggctcactgcaacctctgcctcccaggttcaaggaattctcgtgcctcagcctcctgagcagctgggattacaggtgcccgccaccacttctggctaatttttatatttttagtagagatggggtttctccatgttggtcaggctggtctcgaactcccgacctcaggtgatctgcctgcctcggccttccaaagtgctggaattacagatgtgagccaccatgcccaggccagacacaccattctgtaatgtgattacattgcacataaggaactttcgccctcaattcttgggggcaaagatgtcatctttcttacgggggtgccttgcatatacttttttgtctctgggttttggcccaagttagcacttttatttcttcttctttttcctccttcttccttctttcttctttccttccttcttctaacttctttctttcttcctcctcctcctccctcttctcctcctcctccttcttccttcccctgctccccttccctccttccttcttcttctttctcctcctcctccccctcactttgtcatccaggctggagtgcagtggtgccatctcagctcactgcagcctcaacctcccagattcaagcaatcctcctgcctcagcccctcaaagagctgggactacaggtgtgcagcaccatgcatggctaatttttgtatttttagtagagactgggttttgacatgtttcccaggctggtctcgaactcctgagctcaagctatccacccacctctgcctcccaaagtgctaggattacaggtgtaagccacctgtgcccagcctatttsatcttactgtatacttccggcaactaatggcaacccctttcctaagtataggttgccagttagaagttctacagaaacttgaaaaacngagaattgtgttggcatcagcaaaccaagaatcaaaatgttcagtagagaaatgaaagttctgataagttgcastaggtgtctttgtttttattctaagaacaggctaatgtcatggttccttctttagtcccatatagaaatcatccgtggccatgcagccttcacgagtgatcccaagcccacaatagaggtcagtgggaaaaagtacaccgccccacacatcctgatcgccacaggtggtatgccctccacccctcatgagagccagatccccggtgagtcatacaacaggtactcattaacagcagtcaggagtttactgttgctttcaacctgaaaagccatgccaggggatctgcctaaaccagttctctctttggagccaggccatgggagaaggtctytgcagaacctaactccagttggcttagtggtagctagtgatgcagtcgcccaggctggagtgcagtggcacgatcttggctcactgctacctccgcctcctgggttcaagtgattctcctgcctcagcctcccaagtagctgggactacaggcatgccaccaccacacttggctagttttggtatttttagtaragatggggtttcatcatattggccaggctggtcttgaactcttgacctcaggtgatccacccaccttggcctcccaaagtgctgggattgcaggccaccgtgcccagccaararatttcatttggccccaggctcagacatattgcaggtaacagagggagagaaatcaatgaaagcctcattctttccttcttagcttagcatacattgtttccagcctcagtttgtcagacgggttgttatttacaagacacgtgataatttattgttttgttcaagagagagaaawcttgtaaggatgtagcttgagtagctaagtgagcttttatatgcatatttttctcttttaagtagagacttatagaagattaaagctgtaaggaatctcagagatggtcataacttcttttgcattttattttattatttatttatttatttatttatttagagacagagtctggctctgtcacccaggctggagtgcagtggcacaacctcagctcactgcaacctccacctcctgggttcaagcgattttcctgcctcagactcccgagtagctgggattacaggtgtccgccaccacgcccagctaattatgtactttagtagagacagagtttcaccatgttggtcacatgggcccacctcggcctcccaaagtgctgggattacaggcgtgagccactgtgcccggcctattattttattttatattattttatttttttgagacagggtcttgctctgttgtccaggctggagtgcagtggtgtgatcacagctcactaaggccttgaccaggacgtttagatgggagatggctcaagcgatatctttyttttttcccagctagattataaggactttgtggatggtgaacatagtttatacatcttttgaattttccatggattagcttcataagatccattatcaaggtgaattttttttttttttttttttttttttgtgagacagattcttgctctgccacccaggctggagtgcagtggcgcaatctccactcactggaacctctgcctcccgggtttaagcaattctcctgcctcagcctccttagtagctggtactacaggcacataccaccatgtccagctaattttttttgtatttttagtggaggtggggttttgccacgttgtccaggccagtctcaaactcctgacctcagttgatctgcccaccttggcctcccaaagtgctgggattacaggtgtgagccactgcacccggccaaaatgcaacatatatatttttttgtttgtttgtttgttcagagacagagttttgcttttgtcacccaggctggagtgcaatgggaggatcttggctcactgcaacctctgcctcctgtgttcaagcaattctcctgccccagcctcctgagtagcagggattacaggcatgcgccaccacactcagctaatttttgtatttttagtagagacggggtttcaccatgttggccaggctagtctcgaacatttgacctcaggcgatctgcctgtcttagtctcccaaagtgctgggattataggtgtgagccactgcacctggcctaatatatttaataactgatgagaaatgagggtaggggggctacagagagaaggaatcagcagttgacaactgaaggctttgtctgcattattgggagcaggtggtaactgaagtggtaaacttgagagagatatgggttggaagataaaattaaggttcagttctaaatagactaagtttgaagccaatgtaaaattgtgtggcgagatagttagaaacatggaactgcaacctggggagaaggtcaaacctggaagaatgcatctggaagtcctgcaagataggacctgctatcctatatccaaaggtttcaatctccttttcactacatgtatatttcactatataggttgtacctcttgtaattcaatgtgtacaccatataggttgaaacctttgaaagaataagcagagaggaaagggccacgtcgatttttttttttttttttttttttttttggagacaaaatcttgctctgttcccaggctggagtgcagtggcacgatctcggctcactgcaacctccacctcccaggttcaagtgattctcctgcctcagcctcccaagtagctgggactataggtgcgtgccaccatgcccagctaatttttgtatttttagtagagacagggtttcaccacgttggccaggccacatagattttgaactacatagaaatttgtcttttcaggcaggaacggtgtctcacacctgtaatgagctgagccccagggttcctacctgcccttggggtgggagggtgaacagatccaacagagtctgttcatgaccactgagatcttcattcttcagagaaatgtaaaagttatttagccatcatggcttctgtttctagagagaaaataaaaatgttaactcagggaggatttggttggcagctttccaagcagagactttaacaaaacttgtcaaaacggagactatgttggctgtgaaagtgtttggtttttggcataaaatgttgtgattrctttgcaagagaaagagcagtcttgtgtgatctatgttgcctttttctacataggtgccagcttaggaataaccagcgatggattttttcagctggaagaattgcccgggtaagccaacctgacctgacctcagtgactcattcttccttactgtctcctggtaacttttcttcgtcttctcctcccaagcatttaatgtaggcctttcctgaattccctcctcttacagcttctcttttcatgaccttgtatatctcattcctagaactcctcagtagatccctcaaatctttcatgctttyaatcagaggccaaagtcaaatgcagggtaatttgaagactgcatagcaaagtcctaaaactgtcttctttcttcaacttaatacagcatcaattaagaatgtgtctaaagtagcttgtattttagaatagaatagctggttttggccagatgtggtggctcatggctgtaatcctagcactttgggaggctgaagcgggcagatcacctgaggtcaggagctcgagaccagcctggccaacatggtgaaaccctgtctctactaaaactatggaaattagctgggtgtggtggtgygggcctgtagtctcagctactcgggaagctgaggcaggagaatcacttgaattctcaaggcggagttgcagtgagacaagatcacaccaagaaagaaagaaagagagagagagtgccaccacgccccgctaattttgtatttttagtagaggtgggttttctccatgttggtcaggctggtctcaaactcctgacctcaggtgatccgcccgcctcagcctcccaaagtgctggaattacagatgtgagccaccacacctggccagattttcttttaatgaacaaacatttttttttttagagacagggtcttcttccatcgcccaggcaggagtgcagtggtgccatcatggcttgtggtagccttgagctcttgggctcaagcaatcctttcacctcagcctcccgagtagctgggactacaaacgtgcaccaccatacctggttaactttttaatttaaatttttgtagagatggggtctcgttctgttgtccrggctggtctagaattsmtggcctcaagcaatcctcccaccttggcctctcaaagcagtaggaatacaagcatgggccaccgtgctgaatggatttagattcatagaggggcaaaaagatcatgaggaagtttgtttctctgatttgaagttgctgtacattgcaggctttctagtttagagggatgctcctgtcacttgtgagaagaggtgatgcctggaaacaggtggagggacccaatgtgttggcgcagggactggccttcattcatcttctgagtggcactcactgtggagtttgcattgctcaactcttctgctccctcaggggctgtgctaatccagtttgaggtcctaatcctatgcttttagaagggcttttagggagagtgactcatagtccatgagcctatcttcactttgattcacccagagtcatggacagttcagacagcacgaggcagttcagaaaggaccagggagctgctttgcagttccataggatggtgaaaatgtcccttgaagatacctcagaccaggcaggcttctgacttggaggagttctaagaaaaccatacartcttttttggtttgctatcaggtcgcagaaatgtgttagagaacagccttccttccctgtgatccaccctgcattgtttgattttagggttgagtgacatgacatatgtgaggatgtagtgagacatacagtcatgactcattatgtttggataatgtaatttcattccggactcaccctcaaagaagtttcattataaatagctgttcattagcaattttaaatatttacatttatgcatgtcatcaacaaaaggctctgaaacacaagaaaatgaatttacgattgatacgtgattcttcaagtctactttatctttgttacggtgttggtgaataagtaataactgggcaagtacataaataatgtagggaagatagcatgatttagtttttgcactgagggggcttctgtttggatggagcatgaaccttgtggaatactgtgcatgagtagtcctggggctgcaacgaggtaaagagaaatcttttagggattcagccgcctgaaagatcagttccagaagccaggcacagtggcttatgcctgtaatctcagcactttgggaggcctgaggcgagcgaatttcttgagcccaggagtttgaaaccagcctaggcaacacagcacaacccgatctctgcaaaaaaaatacaaaaattagctgggtgtgttggcacatgctggtagtcttggctacttgggaggctcaggccggaggatcacttgagcctaggagttcgagaccagcctgggcaacatagggagatattgtctctgcacagagttttttcctctctgaagaaatgaggctaaagagctttaaaaacaatgaaaaatacatttcccttctgtgacgggatattagggatttttcttttcttttgagatagggtcttttgctctgtcacccaggctggactgcagtggtatagtcatagctcactgcagcctccacctcccagacacaagttatcctcctgcctcagcctctcaagtaactgggaccacagacatggaccatcatacttggataatttttatttttacttttaggggttttttgtttgtttgtttgtttgtttgtttgttttgtttttttgagacagagtctcgctctgtttcccaggctggagtgcattggtgcaatcttggcttactgcatcctctgcctcctaagggcaagcgattctcctgcctcagcctcccgagtagctgggattacaggcacacaccactgcacctggctaactttttgtatttttagtagagacrgggttcaccatgttggccagattggtctcgaactcctgaccaggtgatccacccacctcagcctcccaaagtgctaggattatgggcatgagccaccgtgcctggccttacttttatgtttttgtagagatggggtctcactttattgcccaggctcaaaggaatattttctacttaaagttgcagtggtatccaggattggatcttggaacagaaaaaaaaaaagattaatagaaaaactgggctaggcaaggtagcttacaccygtaatgccggcactttgggaggccaaggtaagagcattgcttgagcccaggagctaagactagcctgggctaacatggtgagactctgtctctacaaaagaaaatataaaacttagctgggtgtggcgatgaatgtctgtagtcccagctactcaggaggctgaggctggaggatggcttgagtcctggaggttgaggctgcagtgagccgtgttcacaccactayactccagcctgggtgacagagaccctgtctcaaaaaaaagggaaaaagtgaaaatctgcagtctagggtttagtcattagtaatgtaccaatgtcaatttcttattttgacaaaggtatcctaattaagtaaaatattaactttagggaaaactgatcaaggggtataataagggaaatctctgtactatctctgcaacttttctgtaaacgtgaaattattccaaaattagtttatttaasaatactaaccctctgctcgcgtctcagccgcagcgtcattgttggtgcaggttacattgctgtggagatggcagggatcctgtcagccctgggttctaagacatcactgatgatacggcatgataaggtaaatgccacctttttcttttcgcttttcttgatgttaatttaaaaaatgaagaattttttcttatgttgtcgttaaatactagggtgcaaagcaggtgtgggggtcatttggttggtttcatatggtgctgtatccaagttacctgaatttggcctatatccctcccagttgctggttsatgatgataattttgagttggtcaaattggctggtaatttcatcactaagtggtagatagtcatgagatgccctcatagggagacgtggggcctaaacataactattagctaaattaaacagactgttassttaatttatttttttatttttattttttgagacagagtctcactcttttgtccaggctggagtgcagtggcaccatctcggctcactgcaacctctgcctcctgggctcaagcgagtctcatgcctcagcctcccaagtagctgggattacaggtatccaccaccatgcccaactaatttttgtatttttagtagagatggggtttcaccatgttggccaggctggtctcgaactccctacctcaggtgatccacccacctcgacctcccaaagtgctgggattacaggtgtgagccaccaagccccgccaggttaatttattaatttctggaaatcaattttatatgatcaagtaakgttagattgttaccactcattctaaacaatttactaaattctttgcattaaarcaggggtgtccaatcttttsgcttccctgagccacactggaaggagtagaattgtcttggactacacataaaatacactaacacaaacaatagctgatgagctaataaaaaaataaattgcagactgggcacagtggctcacgcctctaattcccagcactttgggaggctgaggcgggcggatcacttgaggtcaggagttggagaccagcctggccaacatggtgaaaccccatctctactaaaaatccaaaaattatccaggcatggtggcaggcaactaatcacagctacacgggaggctgaggcataagaatcgcctgaacccaagaggcagaggttgcagagagccaagattgcaccactgcactccagcctgggcaacagagcaagactctgtctcaaaacaaaaaacaaaacaaaacaaaaaaactgcaaaaaaatctcatagcattttaagaaagtgtacaaatttgtgttgggccacattcaaagtcatcctggtccgcacacggcctgcaggctgcaggtcgaacgagcttacattaaagggaatcttgtagatcatacacttgaaattttttttttttttaagagacagagtcttgctatgttacccagtctgcagtacagtggcatgatcatagctcactgcagccttctgagctcataggattttcctgcctcagccttccaagtagctgaggctacaggtgtgggccaccatgccctgactaatttttttttttttttttttttgagacagagtctcactgtgttgcccaggctagagtgcggtggcacatcatggctcattgcagcctcaaccttctgggctcaagcgatsttcccaccccagcctcccaaatagccaggactacaggaacatgccaccacacccagtgaggtttcaccatgttgcccaggctggtctcaaactcctgagctcaagtgatccgcccacctcggcctcccaaagtgcttgggattacaggcatgcgccacctgactactttttatatatttttagagatgaggtcttactatgttgcccaggctggtctcgaactcctggcctcaagctatcctcctgcctcagcctcccaagtagcaggtggagttcaagaccaacctgggcaacatagtgagacccccatctctactacaaaaaattaaaaaattagcaaggtgtagtggtatacgcctgtagttgcagctacttgggaggctgaggtaggagaatcacttgaatccaggaggtcaaggctgcagtgagcaaagrktgtgccactgcactctagcctgggcagctgactgtccctaacaaacttgtgacttaggcaagccacataatgcctttggggcctagttctgcagggacagaatttatcagatccctgactaccaagatgctatgattctaattcttatgtgagcagatggagggagacagggattctgagaatcctaggcagtatgtactttaaggaactttctctgtggctttgaaactggttatataattagctccaggagattgaggtcctgaataatattttttcataggtaagtattattttgctagaatatatccagcaaattagaaggatggggaaaggtagaggagttcctagcttgaatttatatatagataagtaaataaactgcagcagtctgtcaataaagggggtaattcttgcatctgtaaaattggctactttgcagagagccacatctacttgggcttcctgccctctcccatcccaaatgcaccaagttcattctccctttttttcccagtgttaactccattttagagctactctgtgggtgggcatggtggctcacacctataatcccagcactttgggaggcctaggtgggcggatcacctgaggtcaggagttcgaggccagcctggccgacatggcgaaaccccgtctctactaaaaatagaaaarttagccaggcatggtggtgggcgcctgtaatcccagctcctcgggaggatgaggcgggagaattgcttgaatccaggaggcggaggttgcagtgggctgagatggtaccactgcactccagcctgggtggtagagcaagactccctctcaaaaaaaaaaaaataaaagaactactctgtgaataactcatgacctcccacctgaactccacatgtggatggtcacagatatatctccaaggccatactgttgagatttatggctagacaagattttgctagtaaatcttcccttcaatcatatcagagggaaagcagaccttgagatacgaaaagtggaaagagaatttctgttccctggacttaaggaaaagagaagcaagctttgtgaggagaagacagtggacaatggctgtccatttaactgtaggacaggagttggtgaagtcatatgtattgcagatggtggtggtgatgtaggaaaatagggaatttattaatactccactcccaatatggccataagtaargaggaaataattaggggagagataatgctgaagtttccctcccaagtttgtggtgtgtctttgctcaagttttcttcctctcgcattacccatccctatgttgatatgcaggtacttagaagttttgattcaatgatcagcaccaactgcacggaggagctggagaacgctggcgtggaggtgctgaagttctcccaggtacagtgccaagcccaggcatgcacgcggcccccagtcaatcacactttctgcttgtggcttcgcccagttagtttaaaaacacaaacactatgtctaccccggtccatatattccacctctagggtactccctattatttccttcctcctaagaagctgtattttagccaggtgcggtggctcacacttgtaatcccagcactttgggaggctgaggtgggcggaacacttgaagtcaggacttcgagaacagcctggccaacatggtgaaaccctctctctattaaaaatacaaaaatcagctgggcgtggtggtgtgcacctgtaatcccagctactctggaggttgaggcaggagaattgcttgaacccagaaggtggaggttgcagtgagccgagattgtgccactgcactccagcctgggcgacaagagcgagactccgtctcaaaaaaaaaaaaaaaaaaaaaaaagtctgggtgtggtggctcacacctgttatcccagcactttgggaggtcgaggcaggcggatcacctgaggttgggagtttgagaccagcctgaccaacatggagaaactccatctctaccaaaaatacaaaattagctgggcgtggtggcgcatgcctgtaattccagctactcggggcaggagcatcacttgaactcaggaggtggaggttgtggtgagctgagattgtgccattgcattccagcctgggcaacaagagcgagagtccatctcaaaaaaaaaaaaaaaaaaaaaaaaagctgtattttacattacagccttgaagtcaagggtaaaatattagaaatctggcagttgaatttagatgaactttgattttttttttttctttttgagacagtgtctcactttgtcacccaggctggagtgcattggtgcaatctcagctcactgcagcctcaacctcctgggctcaagcaatccttccacctctgcccccaccaagtagctgggactacaggcacatgccaccacgcctggctaatttttttgtattttttgtaaagatagggttgagccatgttggccaggctggtcttgaactcctgagctgagactatctgcccaccttggcctcccaaagtgtaaggattacaggtgtgacccaccacacccggcccctgattttttaaatttggattttaaaactttgatttttgtgctcaggtgtcttattacacatccttaatatttttagatttatatttattttttaggaaatattatggaatctaatttttatcttttttttttttgagatagaatttctctctgttgctcaggctggagtgcagtggtgccatctcggctcactgcaacctctgcctcctagattcaagggattctcctgcctcagcctcctgagtagctgggattacagtcacgcaccaccatgcctggctaatttttgtattttcagtagagacggggtttcaccattttggccaggctggtctccaactcctgacctcaagtgatccgctcacctcagcctcccagggtgctgggattacaggagtgagctactgtgcccagcctatctttcttgggttttttggtttgtttgttttgttttgtttttgagacagggtcttgctctgtcacccaggctggagtgcagtggcacagtcacagctcactgcaacctccacctcccaggttcaagtgattctcctgcctcagctgggaatataggcacctgccaacaagcccaactaatttttgtattttgttttagtacagatgggtttcaccatgttggcaggctggtcttgaactcctggtctcaagcgatctgcccacctcaccctcccaaagtgctgggattacaggcatgagccaccatgcctggcctctatctttcatttttraaattatttttcttgacacaaggtcttgctgtgttgcccaggctgtagtgcagttccatgatcattgctcactgcagtctccaactcctgggctcaagcaatcctcccacctagcttctacaggtgcatgccaccatgcctggctaattaaaaaaaaaatttttgtagacatggagtctcactatgttgcccaggctgttctcaaactcatgagctcaagtgatcctctagcctcggcctcccaaagtgttgagattacaggtgtgagccaccatgtccagcctagaatctaattttaaatcataccctttgaattttgtagttagaaagaattacaaagtgctttattcctcaagcaatcacttgaatttcaggcagtattttcctagagaattagccttttaaaaatgatcttcccttcccccacacagcctcaccttttcagtatagaccacatcaaataaaattgtgaatgtaaaaatgctcggctggtggaggaggctaccatcataaccaccttaggaccttcagtaaactatttattttctccactctccaaacccaagtcttactttccttcattccaattaagaatatacagagatcccaggcacagtggctcacacctgtaatcccagcacttgcaaggccaaggcaggaggagaatcagttgaggccatgagttagagaccagcctgggcaacataacaagatgccatctctatgaaaaatttaaaaattagccagatgaggtagcacgtgcctgttgtcctagctacccaggaggctgaagtgggaggagagcttgagtccaggaggctgatcttgccactgcactccagcctgggcaacagagcaagaccctgtctcttaaagaaaaataaataaataaataaataaataaatatattattttatttatatgtaaatgtatatttatataaatagatttatatatgtatattttatttatatatttatattttatatatgtatattttatttatatgtatatttatatataatatacatatataaatatacgtattatatartatatgtatataaatatacatatatatacatttatatatataataaataaaaatatacatatatttaatacatatatttaataaaaacattaaatacatatatttaataaaaatataatttatatataatatacatatatttatatataaatatatttatatataatatgcatatgtttattttacatatataaatatatttatatataaatatacgtatatttattttatatatatatgtgtgtgtgtatatatatatatatacacacacacacgtatatacccagggagaggcactaattgtgcagttttgaaaagtttcctagtgatgctgccgtggcctactttcaaagcactatgcttaggtttaccacttaaaatgttattacatttttccagaagtacactttaaaatactttgtttttaaagtgaggcattacaatggtgtcatgagctgacattcccagccactgactggaagatttgggtcaacccagggaacaggcttggtttaagggagttcaagtgttggtggcctttgggtaaaagtttatgtctatstttgtatgtgggattcagtagggattttctttaatgttaaaaattctagtttcctctgtatttgctttccttcttcccctgtcctccctgagcctccacacatgtgtaacacattttatttgccmataggtcaaggaggttaaaaagactttgtcgggcttggaagtcagcatggttactgcagttcmcggtaggctaccagtcatgaccatgattccagatgttgactgcctgctctgggccattgggcgggtcccgaataccaaggacctgagtttaaacaaactggtaagctggcttggtctgcccgaaacatttgtgaatctactnggagtcttatggttttattttccccccagacacccaaaacttgggtggattccattggattcttttctctttttcccatgtattcagtttgtgatcaaatttcattgcttcttcctttgaaattaaaaaaaaaagttttctcttctcttctttccttttcctttcttttctgtttttgtttttttctttttgtttttgagaaaggtcttgctctgtcacccaggctggagttcagtggtgtratcatagctcaccgcagtcttaacctcctaggctcaagtgatccacccacctcagcttctggagtagatggaactatgtgtgtgccacamtgcccagctaatttttttatttttattttttttasasatgaggtttcaccatgttgcccaggctggtctcctcggctcaagcgattcgcccatctcagcctcccagagtgctgggactataggcatgtcccagcatgtcccagaaaaaggccgccacgtctggcctttttcttttttgttttmtttccttttttttttttttttttttgagacagggtcttgctttgtcacccaggctagtgtacagtggcatgatcatagctcactgcagtcttgaattcctggggtcaactgatccttctgcctcagcttcccaagtagctggagctacaggaatgtgccaccacacctggctaatttttaagttttctgtagagatggagtcttactatgttgcccaggctgctcttgaactcctggcctcaagtgatccttccwccwcggcctcccaaagtgctcggattataaacatgagcytccatgcccagccggcctgccacctctaacctagtttsstattggcctccctcttacagacttcgtttttgctatgtgaatgtctctttcaagtcctatgctgatcttttagcatctgtagtaggtaatccagattgctgggtgggtaactgtcttgtacattgtacacagggatgggaacagatgtgaagctgtctctcttggctctacccgtgctgtctgtatttgtggacagttggcattcttacttgttcttttaaatgttgaagtaaaatctagaatgggagcttggggtttggttcccagagtttgacccaaatttgaaccttagttcttacaacataacagttgcatggctttgagcaagcagcttaatttctctgcttcaagtggttcatattcacaatgggaatgaaaaaagttcttgcctcattgggttatacagaagagtaaatgaaaaagtgcatgcaaagtaatttataactgagaccctagcttacattatgaacacaatgaatgttcacctgctattgataatgatgatgatttttctgatatgctatactactctattagtaataataggatattttatgtttgaggtgcatatatttattttgttctgggtttttttgtttgtttgtttgtttgtttgtttgttttgagacagagtcttgccgtgttgcccaggctggagtacagtgttgtgatctagctcactgcaacctctgcctcctgggttctagcgattcgcctacctcagcctcccgagtagctgggattccaggcgtgtaccaccacgcccgtcgaatttttgtatttttttaatagagacaggatttcaccatgttggccaggctggtctcgaactcctgacctcaggtgatccacccaccgtggcctctcaaagtgctgggattacaggcgtaagccactgcgcccagcctgaggcgtatatatwtratagagctgcttgagcagtgtataccttttgacttatgttctaatactaagttcctgttgtaatgtggattccttttctgtttctgtaaaaggtcatttttctgcatgttaacttataaaatattcagggagatgttttgattgtttgtaatcttattcaatgacatttagtaaaattaattgcctattttcatattaacaaaactagtcagccaggcgccgtggctcacacctgtaatcccagctctttgggaggctgaggcgggtggatcacctgaggtcaggagttcgagaccagcctgggcaacgtggtgaaatgccgtctctactaataatacaaaaattagccrggcatggtgacgcatgcctgtaatcccagctacttgggaggctgaggcaggagaatcgcttgaacccaggaggctgaggttgcagtgagccgagatcacgccattgcactccagccctggcaacaaaagcaaaactccgtctcaaaaaaaaaaaaccaaaaaaaaacaccaaaagaaaacaacaacaacaaaaaactggtcattcagcttttcacctttcaagagatattttgccattgtacagatgtaagcactgataggtccagttttcaactaaatttgctaacttttttkgggggggttggayagggtcttgctctgtcacctaggctggagtacagtggtgccatcatggctcactgcatccttgcagcatcaaactcctgggctcaagccatccttctaccttagtctcccaagtagtaggaactacaggcgtggtccaccacacctggctaatttttaaaaaamatttttgtagacacaaggtctcgctgtattacccaggctaattttgaactgggctcaagcgatccttccacctcagcttcccaaagtgctgggattacaggcatgagccattgcacccagcctatatttgctaaatttttgaagaatgaggcaaaaaaaaaaggttcagtctcatttgacattaagatatatttatataatgcaaattgagtgattactatgtgctaggtcttgtcaacatgttactaatctaatttaatcttgccaacaaccggcaaggtataaggaagccaggagcacagagatactagataatttactgggctgtaaactctatggtgtagggagaatgtctgtcttaccatggtattctcagtgatgaagtcaaagtctcatttgtaatagaagcttaaatatttgttgataaacaggtggttatacaaggtctcataaccggtaagttgcagagctaggatttgaattttggtctgtctgtaccaaaggttgtactctttyttttttttttttttttttttttttgaggcagagtctctttctgttgcccaggctggagtcagtggtgccatctcagcttactgcaatctccgccccctgggttcaagtgattctcctgcctcagcttcccaagtagctgggacttgccaagtaggtgggcatgcaccaccatgcctggcgaatttttagtatttttagtagagacagggtttcaccatgttggccaggctggtctcaaactcctgacctcaggtgatccgcccgccttggcctcccgaagtgctaggatttacaggcctgaaccactgcgcctggccagttgtactcttaagctctgtggctacttacttcctacttctgccatatctctacttctcatatatacttaggatttgcaaagccacatgataagcataacatgtcttcttaaagcaaaaatttgactacatataggaaaatatttttggttaagggaaacatcaatatgtgtttttgttttgttttgcttttacttttcttctgggagtctgaaaaaaacatcagtatgttttagagtagagtgcaaaagttgcttggatttttaaagacaaaatggtaagcttcatagaaatgtgcttttggccaggcatggtggctcacacctgtaaccccagtgctttgggagacctaggcgtgaggatcacttgaggccagaagtttgaggtcagcctgggaaacagcaagacctattctataaaaaaatgttaaaaaggctaggcgtggtggttcacgcctgtaatcccaacactctgggaggccgaggcaggtggatcacgaggtcaggagatcaagaccatcctggctaacatggtgaaaccccgtctctactaaaaatacaaaaaaattagctgggtgtggcggcgggcacctgtagtcccagctactcgggaggctgaggcaggagaatggcgtgaacctgggaggcagagcttgcagagagcctagatcgcgccagcctgggcgacagagcgagactccatctcaataaataaataaataaataaataaataaataaataaataaataaatgtatgttaaaaaattatccaggtgtgatggcacatgcctctagttctagctactcgggaggctaagcaggaggattgcttaagcccaggaggtcaagattgcagtgagccatgatcacaccactgcactccagcctgggtaacagagcgagaccctgtctctaaaaaaaaactaaataaacatagatatgcttttggtgactgcttgagtcagtgttcctcaggagcagtgcttccatgggacaagttgaaaagctggactccagagggattccaagtggcacacctgatagttgagtgatcctcttcatgtctgcctggccagttgaattgtacattgcaatgtcaaatcctgttaaaacatctcaaaagtggataaaatactaccttttatgttaagcaagatatgaaacttgccaacttttttttttctaatttctaacagaggcagggtctcactgtgttgcccaagctgatctcaaactcctgggcttaagggatcctccctcttyggcttctcaaagttctgggrttacaggtgtgggcccactgtacccagcttgaaacttgccagctgtaaatgcctttcgtgttgcagctgagtctcatggtttcttggagattctggctgcagttcccatgtgaaatgaggaagggagatccagaggtttgatctaccttttttagtaggtgggccaagtggttacatgatatctctttgtaattttaggggattcaaaccgatgacaagggtcatatcatcgtagacgaattccagaataccaacgtcaaaggcatctatgcagttggggatgtatgtggaaaagctcttcttactccaggtaaggtctcttcccttcttggtgagggagggtctgcgtgttacatgatccatctggctcttcactgtcaaatctgcagtctgcttaagcaaagttaaaaggatgagtgtctttatattgtcaaaatggtacaatgtgttgaaatagatattggttggatacctgacattatctgaataaaagacttaaaatgcttagcacagactgaagttttcatgtagacaatatgatcaccygttgcggaactctcttaggagcagacttgtgcttggtggcagtggaaggaagtggcatttggaagaagtaatttagattggcatttttttttttttttggagacactctgttacccaggctggagtgcagtggcatgatcacgggctcactgcagtttcaaccttcctgggctcaggtgatcctcccacctcagactcccaagtagctaggatcacaggtgcattttttgtaragacagggttttaccatgttgtcttgaacccctgtgcttaagcagactgcctgcctcagcctcccagaatgttaggattacaggcatgagccaccacacatggcctagattgtcattcttgtatgactggtcttgatacaaccaagamygatttccttctctccggcatcccacacctcagcccgcttcctaagcaccattgcaagctctgtcccatctctatccattaatgatsacttgatstactttcagtctgtacctagaacctcatcagcgattccagcgtgtcccagggccttatatcaggatgaaaacctacaccagtcacacacccaaacccttttagctcctttagaaagttcttgctcttggctaggtgtggtggctcccatcactttcagaggctgaagttgggggatcgcttgagtctagtagtttgagaccaggctgggcaacatagtgagatgttgtctgtattaaaaaaataaagattcagctgggcacggtggctcacgcctgtaatctcagcactttgtgaggccgaggtgggcagatcacgaggtccagagatcgagaccttcctgaccaacatggtgaaaccccatctctgctaaaaatacaaaaattagctgggcgtggtggcacacgcctgtagtcccagctacttgggaggctgaggcaggagaattgcttcaacccgggaggcagaggttgcagcgagctgagatggcgccactgctctccagcctggcaacaagagcgagactctgtctaaaaaaaaaaaataataatataataataatgataataataataaagattctaggyrcagtggctcatgcctgtaatyccagcactttagggttataaaatagaactaaagatgctgaaaactaatatagcttgttccataaatattgtattaaaaagctaatatcttcattaagtagattaactgccaggtaagtgagaacttgtgaatgtgtcttttgggagtggggccagacaggttgagcatcccttatctgaaatgcttgggaccagaagtgttttcagttkcagattttggaatatttgcatatatataatgagatattttgcagatgcgacccaagtckawacacggaattcatttgttttacatacaccttatacacatagttggwaggtaactttatacgatattttaaatgtgtgcatgaggcatacttttgtctgcgtttttgactgcaacccttcacatgaggtcaggtgtggaattttctgcttgtggcatcatggtgctccaacattttggattttggattttgaatttctggattagggatgctcaacctgtaatagaatgtataggattctcataagccaatcattttgagttgttcgctgaggcatgacatatcttcgctgtattaaactatctagatagtgtaatgaacaatggtgtgaaactgtcagaactagggcattaaggtagatggataaatggctagtggaacaatttagctatgttnaaacagacagtaagataaacactgattttaaaatatctccatagttgcaatagctgctggccgaaaacttgcccatcgactttttgaatataaggaagattccaaattagattataacaacatcccaactgtggtcttcagccacccccctattgggacagtgggactcacggaaggtaggtatttaaaaactgaaggtcatttgtggtttccttcctctttcccctgcccccaactttaaattaggtctctgtcagctgatgaaacctatctcagccccagattacattgctttttggttactctcttgtcacagttccagttttctcccctgctactacyttgagtgtacagtatctttccttcacaccaccctatctctttgatcttttttttttagcttttttatttgaactaattttaaatttaaagaaaagctctaaaaataatacaaaggactcctctctaaccttaatatttttgcttttttattttttcactctacacacacacatgtctatctttcctaagaactggcccttacataaaccgagtatcattttctttttttttttctttttgagacaagctctcccactgtcacccaggctggagtgcagtggcacgatctctgctcactgcaacctccgcctctgggttcaagcaattcttctgcctcagcctcccgaatagctgggactaccaggcctgcaccaccaccatgcctggctaattttttgtagagatggggtttcactgtgttgcccaggctggtctcaatctcctgggctcaagcgatccacctgcctctgcctctcaaagtgcagggattacaggcatgagccactgtgcctggcctttcttttcatctagaggcagaattcctcagccctycttttgtcttatatgacactgacatttattttgtagaatacttctcattttggcgtggtttgatatttcctcgtggtttgattgaggttatgtatttctggtcatctccctctttgatagttcagtgtaattgtttagttttctgatagatgctttttttaatgtgcattgtagatgaagccattcataaatatggaatagaaaatgtgaagacctattcaacgagctttaccccgatgtatcacgcagttaccaaaaggaaaacaaaatgtgtgatgaaaatggtctgtgctaacaaggaagaaaaggtaaggaaaaatccagcaaactaaatagtgccttgcaaaatggacagggatggcagtattttgcaggggtggaaaggagggagaccaagcagttgagccttctgattcaactggacaggcccactttgatctgtcttacctgcattttggggttcttcataatatttcatctagaaggaggttccactccttttaaaaaataaagacgatgccaggcgtggtggctcacacctgtaatcccagcacgctgggaggccgaggcaggcatatcacctgaggtcaggagtttgagactagcctgaccaacgtggtgaaaccctgtctctactaaaaacacaaaaatgagccaggcatgrtggtgcgtgcytgtaatcccagctactcgggaggctgaggcaggagaatcacttgaacctgggaggcggaggttgcagtgagccaagatcatgctactgcactccagcctgggagacaaagcgagactccatctcaaagcaaaaaaaaaaaaaaaaaaaaaaaaaacaggagaggccagggccaggcgctgtggctcacgcctataatcctaacactttgggaggccaaggtaggcggattgcctgagctcaggagtttgagagtagcttgggcagcatggtgaaaccccatctctactaaaaatacaaaaattggccgggcatggtggtgccatgaacattcctcagtagcctatgatttctggatattgaatcatgaaggctcctacttagttatttcttcatgccagttatcattcattcagttgataaacattatttgtcattcttctcaagactaagaaytgmtatatagagaggaataatatgaagagytggccatcaccagaggctctttataagttcaattaagatcacaatatcagtcagacaccgtggctcacccctgtaatcccagcactttgggaggctgaggtgggtggatcacttgagcccaggagttcaagaccagcctggccaacatggtgaaaccctctctctgctaaaaatacaaaattagccaggcgtggtggtgcgcgcctgtaatcccagctactcgggaggctgaggcagkagaatcacttgaacccgggaggtggaggttgcagcgagccgagatcatgccattgcactccagcctgggcaacaagagtgaaactccgtctcaaaaaaaaaaaaaaaagaagaaagaaaagaaaatgtttctcttcttttcccaggtggttgggatccatatgcagggacttgggtgtgatgaaatgctgcagggttttgctgttgcagtgaagatgggagcaacgaaggcagactttgacaacacagtcgccattcaccctacctcttcagaagagctggtcacacttcgttgagaaccaggagacacgtgtggcgggcagtgggacccatagatcttctgaaatgaaacaaataatcacattgacttactgtttgagttttatgtatttctttattttaatcaggatcttctgatagtggaaatttttagtacataatagaacttatttatggagttasaaatttgtagtgttatccaggattgattttcatttgatcacatctcacagtaaytaatattttcaagttttttttttattaacagctctgtgctagttttttttttctgttttagcctcatcccaaatataaagctttgtgaagtacaattaacttaatgtacttgaatgaatagaacttgctactttttttttttttttttttgagacagagttttgctctcattgcccaggctggagtgcggtggtgctatttcagctcaccacaacctctgcctcctgggttcaagtgattctcctgccttagcctcccgaatagctggaattacaggcacgcaccaccatgcctgactaattttgtatttttagtagacatggggtttctccatgttggtcaggctggtctcaaactcccaccttcaggtgatccgcccacctcggcctcctgaggtgctgagattacaggcgtgagccactgtgccagcttgctaattttcacagaagttgatggcaattcttcacatgtwaacagtgccagtgcacagaacctttatatattttttgaagccagtactgtgctctgcatataacaaagctgcttcaaggatgaracctttttctaaaagcatgtaatgtgagaagccggcctgccttattttcttttttcttttttaatgawtaaaaatagtttgtggcaaggcacggtggctcaggcctgtaattctagcactttgggaggccgaggcaggaggattacttgagcctacaagtttgargccagcatgcacagcatagcaagactgcatctctacagagagtaaaaaaaattacccgagtgtggtgatgtgcatctgtrrtctcagctacttgggaggctgaggtgagaggatcrcttgagcttgggtgaggtgaggctgcrgtgagtcctgatcatgctgctgcactcaatcttggacaacagagcargaccctgtctcaaaaaaaaaaawatatatatatatatatatatattatttttatgaggtgaagtgcatcaaacttgggaaagatttgaggaggctgggaacctcctggaaaaccactccttgaagaaagatatgagagacatttagaagtgattcctgctttcagaaggaggtggattcaaatacatcaaaagtcccttcctctgctaagtgtttatagttcaatgaataatttcaatatttktatgtgttcttgtcattttatttttttctgaaaaacttccaaaaatttgaaaataaaattacagccttttcttcttataaaatttgttactgtgagctttaattggtacacaggaaattggtttattttctaaggatatttcacattggagaatcagttgcctgtgcttacgggggtgaaaagagagttctcgtataaaaataaagatcgaaggtataaaagaaacatttagcagattaatgattgagttggaagaaaagcctagaaatcacttaggtctttaacactttatttctattaggttttaccagctagttaaatttttccaggattttcattagtcatccagtgttactgaatacttttttttttttttttttgagacagggtctagctttgtcgccaggctggggtgcagtggtgtgatctcaggtcactgcagcctcccggggtcaagcagttctcctgcctcagcctcctgagtagctgggatcacaggcacgcgccaccacacccagctaatttttgtatttttagtagagatggggtttcaccatgttggccaggatggtcttgatctgttgacctcgtgatctgcccgccttggcctcccaaagtgctgggattacaggcgtgagccactgcactggacccactgaattctttactgtgtgttctgttaagcttttactgactgtctttctggttagtgatggccagttactgaactgactttttttttttttttttgaaaccaagcctggctctgttgcctaggctggagtacagtggcacgatctcggctcactgcagcctctgcctcccggggtcaagcgattctcctgcctcagcctcctgagtagctgagactacaggtgcacaccaccacacctggctaattcttgtacttttagtagagatgggttttcaccatgttggccaggctggtcttgaactcctgaccttagaagtaatctgcccacctcggcctcccaaagtgctgagattacaggcgtgagccaccacatcyggcctgcactgacttcttaagtaggcccaatgtcaatgaaagaaaaatattgtattagcaaggaagttatatgtattgtggtgggacaagaaaataggatccccaaacttgggcatggactaatgtaggcacttctcccctcttcccctagcctaaaagacagtggaccaaggttctaggcttcattctgctggtggatttctcactgcacaggccccagccttgaggtgtgcctctgtcagggaaatgggaggccctagtagccacatctattttaacatcatgtgttcttaatctcatatttatcctttctgctgcctgtgtgctggttccatagtaaaccaacaagaaagtacagtacccttatctgagttcctgtctgcattctcatcggtccttgaactggcccagcccttgaggtgttgtggcttaacagcctctattactgaaagtgccaagaaatatatagcagctcacacctataatcccagcactttgggaggccaagacaggtggatcacctgaggtcaggggttcgagaccagcctggccaacatgatgaaaccccatctctactaaaaatacaaaaattagctaggcgtggtggctggcatctgtaatcccagctactcaggaggctgagataggagaatcgcttgaacctaggaggcacaggtcacagtgagccaagatggcaccactgcactccagcccaggcaatagtgtgagactccatctcaaaaaaaaaaaaaaaaaatgctgggcgcggtggctcacacctgcaatcccagcactttgggaggtcgaggtgggcagatcacgaagtcatgagatcgagaccatcctggctaacatggtgaaaccctgtctctactaaaaatacaaaaaaattagccgggcatggtggtgggcgcctgtagtcccagctacttgggaggctgaggcaggagaatggtgtgaacccgggaggcggagcttgcagtgagccaagatcacaccactgcactccagcctgggtgacagagagagactccgtctcaaaaaaaaaaaaaaaaagatatacaaggcagcacgttgtaaaatatgggccacattgtacttgcacagtagatgtttattgaaggaaagacatgtaacttgctttcaagtaatcttataatctagaatgagaacatttctatacaaataaagcaattaagcacaggatgaccatatgatttattgactaaaatggcacactttcaagagtgaaaggggtgtccttgacaatttacacaattggtacagattagtactgtcctaaacaaataggagattgccatcctcattacacattattaggtaaaaggatacaggttcagaggaccagaagtgcactgttgctgggaaaagtgaggaagggttcacaaaggaggttaggtaggatttgaaatgtgggggctgtagaggaaaaggccagagaaggtagaaagtacagtgaaggaaggattggataaattattgtattgctggctgggcatggtggctcacacctgtaatcccagcactttgggaggctgaggcaggcagatcacctgatgtcaggagttcaagaccagcctgaccaacatggtgaaatcccttctctactaaaaatacaaaaattagccaggcatggtggtgcgtgcctgtaatcccagctgctcgggaagctgaggcatgagaatcacttgaatctgggaggtggaggttgcagtgagcagagaaggcccatcgcactccagcctgggctacaagagtgaaactctgtctaaaaaaaaaaaaaattgctgtataacaaactagcttaaaatagagactatcttaaatctcatgatttttgggtcagtaactggggttaggctcagctggttggttcttctgttggtgttgacaggggtcatttggtgatattcaactggcaaatgggctggtctagagtccaaaagagaattattcatatatctgacacataggcagagatgagggaaggctgtgcctacacgttgcctcttcaccatggcagtctcagagcagtggacttaagtggaagctttgggctgtcaaagtgttctaagaatcccgggcagatgctacaagccttatgacctaaccttggaagttctagaacatcacttctgctacataatattggttatgcaagtcactaaggccagctcacattcaggaggaagtgaattgaacttcacctctaggtgggaaggaatggtaaagaatttgccactgttggctgggcgcagtggctcacacctgtaatcccagcactttaggaggctgaggtgggcggatcacctgaggtcaggagtttgagaccaacctggccgacatggtgaaaccctgtctgtactaaaaatacacaaaattagtcaggtatggtggcagccgcctgtattcccagctactcaggaggctgaggcaagagaattgcttgaaaccaggaggtggaggttgcaggttgcagtgagccaagatcgtgccactgtactccatcctgggcaacagggtgaaactccgtcaaaaaaaaaaaaaaaaaggattgcttctgtctttaatctttaattgtacctggcaatctcctacacattttataaggctggactaaaacatcacctttgtgaagacttaagtagttttgtgtgttctattatgtgttgccataacgtcttgtcacactgtaggtctgcactacatattcactttgtgtatgacatttttcacttaggttactcatttctatcttcctgatgttgtgtttcacagtatcattcccgggatgtcaggcagcaactttggatgcaagacagcagagtgtgttactatgattttttgacactaagatcaaaagtatcagaaaagccaacattttaatcctttacctttttgaaaaacgagtaagcaggcatatttggattcttcagaataataggatatgtgggcatacagaaagagagttattataaggaattcactcatgctattatggagtttgggaagtccaaaatgtgctgtggaggccggcaggctggagaccaggagagacggtggtttggacacagtctgaaggttgagggagagtccccccttgcttagagaagtggtctttttgttttgttcaggccttcaacttaccggttaagcatcccacacatacacacacacacacgcacacacattatggaggacaatctgctttacccaaagttcaccaatgtattgtgagattaatatctcatccaaaaacacccaccaagttgataccattgcaaccaactgttccaagtttgccccagtcaccttggcacctatatacattatatatatatatataaatatatatataatatatatatattcctatgcctttaataatggcataggaatactaagagacatccgtgtgtgtgtatgtatgtatgtgtgtgtgtgtgtgtgtgtgtgtgtgtgtatatatatataaaattttcttttctttttttttttttgagacagcatcttactctgtcatccaggctagagtgcagtggtggatcacggctcattaaagccttggcttcctggattcaagcgattctcccacctcagcctcccaagtagctgggactacaggtgtacaccaccaggcctgcctagctacatttttttttaagagagatggggtcttgctatgttgcccagactgacctcgactcctgggctcaagcagtccctcccctcttggcctcccaaagtgctgggattataggcacaggtgagccactgagcatagcccctatacacattttaaaccatacttaatatctgagtgagaaataacaaggtcatactttcacctaacagaatacaactaccttgtatacaaccacaacacaaaccctttccccagaagaggatgcaaagtccctggttgatgtttgctcttctctttgatatcccataattcaaattctgtgatgtaaagttaataacacttaaatactatataacataaaattaatacatcttatgtcacatagtagatgcataagggaaaaaacatctgatacatatgcgtgcatgtgtgtgtgtgtgcgcatgtctgtgaacaagcattcataataaagtaaggaaatgtaacagttacagtcctagtttctgtaactggacacatggtcgtggctggtatccacaacacctttctccactaccaattccactttccctttgccttcagcaagtgccttagttggttgtggttctttttttttttttttttttttttttgagacggagtttcgctcttgttgcccaggctggagtgcaatggtgcgatcttggttcagtgcaacccccgccttccaggttcaagcgattctccttcctcaaccttccgagtagctgggattataggcatgcgccaccatgcccgggtaatttcgtatttttagtagagacggggtttctccatgttggtcaggctagtctcgaactcccgacctcaggtgatccacccaccttggcctcccgaagtgctgggattacaggcgtgagccaccgcacccgaccggtcgtggttctttacctggtggggtgacccaaatctttgctcccaaaagagtctgtgcattagtggtgctgcctgaattgggctgttgtagttttccatggactttagtaatggcataagaatgctaagcgacaacctagcggatctcctacaggatctctaggttgtcttcttgagctccatggtggactagcagtccaatttcaccttggtagtcattatcaattaccccaaccagccgcatgtggtggcgcatgcctgtagtcccagctactcaagaggctgaggcgggaggatcgcttgaatccaggagttccaggctgcggagagccaagatcatgccactgaactccagccttggcggcagagtaagaccgtctttggaaaaaaaaaaaaaagatcacccggctgatatggtttggctctgtgttctcacccaaatctcatcttgaattgtaattcccacgtgtggag

SEQ ID NO: 93943 - DNA, 23989 bp, Homo sapiens
  misc_feature (1)...(23989): n = A,T,C or G
tactaccatctgatctttgacaaactggacaaaaacaagcaatggggaaagtattccctatttaataaatggtgctgggaaaactggctagccacaggcagaaaatggaaactggaccccttccttacaccttatacaaaaattaactgaagatggattaacgacttagatgtaaaacccaaaactataaaaaccttagaagaaaatctagacaatatcattcaggacataggcacaaacaaagatttcatgacaaaaacaccaaaagcaattgcaacaaaagcaaaaaatgacaagtggaatctaattaaactgaagagcttctgcacagcaaatgaaactatcatcagagtgaacagacaaactacagaaagggagaaaatttttgcaatctatccttctgacaaagattcaatatccaagaatctacaaggaacttaaacaaaaattttgcaatctatccacctgacaaaggcccaatatccagaatctacaaggaacttcttttccacaagaaaaaaaacaaacaaccccattaaaaagtgggcaaagggcatgaacagacacttctcgaaagaagacatttatgcagctaacaatcacataaaaaaaaaaaaaaaacttagctgggcatggtggctcatgcgtgtaatcccagcactttggaggctgaggcgtgctagtgctatgatcaatacaaggaccagaaatggatcaattctaccttggaagaccagaaggatgtcacagacaagcagaataagataatcagggcattctcaatagagttagtcatgcatgcaaagacatggaagtatgcttcaagcagtgtttaatgtattacggaggaagaggatgcaaggaggaaggataaggacagacgatgtaaaaaataagactagagagatagtccagagtcagtgttgaaacacaaatgaagtctagactttatccagaagctgagagaaagacacattgaagagttttagagtcaagtagccatgagggactaaacagtttaaaaactagataaatttgatggctttttgaaggatggagtggagaaagaagttctaaaggcagagtggccaggaaggagccagttgcagcagtcccctcagggtagtggagacagtacagggacatgcttgaggaacagcaaagaagtcaatgcaactggagccgagtgaacatgggaaaagtagtaggaattgttagaagtgacagcttatagtggtttttttaggcattgtaagaacttggccttttactctgagtaaaatcgaatgccactgataggtttttttgtttgtttatttgtttgtttgttttttgagatggagtttcactcttgttgcccaggctggagtgcaatggtgcaatcttggctcactgcaacctctgtctcccgggttcaagtgattctcctgcctcagcctcctgagtagctgggattacaggtgcatgccactgtgctcagccaattttgtatttttagtagagacggggtttctccatgttggtcaggctggtctcaaactcctgacctcaggtgatctgaccgccttggcttcccaaagtgctgggattacaggtgtgagtcactgcacccaggccattgataggttttgagcagaggaatgatatgattagtcttatattttgatagaatggctctgattgttgttgtgcaaaagtagaagtagtggtacaaaaaccaggtgcaagggtttgggaataatccagactagtgataatgacggcttggaccacagttggtgtagtaaaagaccacttgcttgaacgtgtgtagagtgagagagacagaaagaagtaagggtgactccaagggttttggccggaacaaaagggagatgagagaagccgttaattgagatctgaaagactgctggtgaaagagcatcaggagcagaaggtcaggagctcagttttgttcatgttgatcagataagccttcatacagtcaagtggagattttgagtagactgttgccagatataagagtctagagttctcaagagaggtttgaggtagatatataaatctgtgagtcactaatattaaatatatagatggtatttaaagagatgaaatggatgtaatcacctaggaagtgagtgtagataggaacagaagacttccaaaggttgggctccagggtgcaccagtgttgccaagtcagggatgatgagtagaaaccagaagaaaaagtccaaagaaacaaaacaaagtaaacaaatacaaaaactaagaagaaagaaagaggaaaactaaaagggtgtgaagaagaaagtacattaagaatgggataatggcagctttgtcaagtactaccaagacattgagtaagatgacattgagaattgaccatcagacttagtaatagggagattaatgggaactggacaaggcagtgaagtcatgggggtaaaatcctgtccattgggaggacaggaattgaggcaaggagtacataccatcgtggaaaggaattttgttataaaataaagctgagaaatggagcaggaattggaaggggatgtcagatcaaaaggcttttttttttaagatagaaaatgttacaggatagttgtagaatatataataggatatttgtgttttctttattgtatccaatagagaaagaaaaattgatgataaacagtaatggggctgggcacggtggctcatgcctataatcccagcactttgggaggccgaggtgggtggatcacttgaggtcaggagttctacactagactggctaacatggtgaaaccctgtttctactgaaaatacaaaaatcagccaggcatggtgatgtgcgcctgaaagcccagctactcgggaggctgagggaggagaattgcttgaacctgggagacggaggttgcagtgagccaagattgggccactgcactccagcctgggtgatggagcaagattccatctcaaaaaaaaaaaaaaaaaggccgagcattggtggttcacgcctataatcccagcactttgagaggccgaggtgagcagatcacttgaggccaggagtttgagaccaccctggccaacatgataaaactccatctctgctaaaaatacaaaaattagccaggtgtggggggcagatgcctgtaatcccagatacttgggaggctgaggcaggaggatcttttgaacctgggaagtggaggttgcagtgagccaagattataccactacactccagcctgggtggcagagtgagaccctgtctcaaaaacaaacaaacaaaaaaataaacaaagtaagagagaagaacttctagagcaatgtccttgggatccagtgctcaaagataggggctagacttaagtagggtcaagaggagtcatttacagtaaggatggggggaggcagaatttacaggtacaaatggctggcaggtgggttgatacttggtgggagcttgtggaaaggagttcttttgagttggataaataggcctgaagttcagaacggaagtttgagctaaagatagagacacagtcattatccttttgtagaagatagttgaaggtatgaagtagaaaaaaacctggggccaggggagagggtagagtaagggactgaaagacagtgaacaacaatgtggctactggccataagtgcattaagagtttagagaagggaatagcaacaagactggagaggcaatggatttgagctcgaaaggcaggatttggtcagaatcattccaggatcagagcaacagtgatcatgttacaataagaagagtacttttagctaagaacacaaaatataaaatggaaccaagagaaagaaggctcttactgtctgctttgattcaatatatgcatgggaagtatcttaattaatgacagcaatggtcaagggaactctaatggattacagtattgagggttagggtgggaggagtgggatcagagaggctgatggagagcctgaaagaattcttatttatggggtcaggaacttgataaggagaatggagaggaggttttacaatgagtttagaaataaagatttggggaaagccagtaaactcttagatattttattacagcacctctcctttaagatgtgtcccttacatatttaaaagaagaattatatttattgtaatacaaaacttctgactctaaacttcttaatcctacaataatgccagactgtcataaggattatgtaccaatacagtgtttcaaataactcatagctgcacgccttatacacctaggaagcaaagacattactaacaacattgggtaatcaaatatttaactcaagtttctattgatttcaacacacaaaaaaagctgktacatttcctggaactaggggctgggagaatgaaggggaattcccatatgtttccttttgattctattcagaaagtcaggtgaaccaagaaaagagttagaatttcaacttgaaatatgaaaattattttcttctcatcccagatcaatccatctgttttacatagtttccctcttctcctcagaaatttttttggaaaagaacttatgtctgatgtctgatgaaaacaatttatgtcagacataaactcagaatttagggctgaatttatgttcatatgtccttatttcctgaaatggtatcagggcataaggacatatggaaacactgtggggtatctgggagcagaaatatttggataatggaaaagtttattgaaaccaagggactttgaattatagaaacaaaccaaacccaaaatagacacaaatctccataacttacaattttccttagatcttagaaagaatctcaagagggagaagcagtgttaattgttctagaatcagagatttaaaccttaaaaaaaattctacattttaaattaactgatattcaaacaaggagattcaatccaaaattgggcgagggaagtgaatttaactaatcaaaaaacatttacagagcttagcacagtataaaattctatagaagcagcagagaattataatgtgaccctgcccttaagggacttataaggatgatatgtttaaaaaataaaagaattaaaggagaacttaacactttttgaattattgattagtcttcatatggaagcgggtttaaactgtagaagacaggtaaagtaaattgcatctcaataacaagaatgttcttaaaattggcaatgttcaaaggtggaatagactggcccatcaggtagtagattccgtcattcaacattcattcatatattgagctttcaccatctgtcacacatgtgctggggtgatgaggttcaacagtgagcaggacacttcccttaccctccaggggccacatcccaggatacatcatctctgtctagatgtttattggacatggatgttctgaaagaaaacagcaagtttctttttaatctctttaagaagacaaaacatacatatataatattaagtattggtataatatttaaattaaaggtcaagacaacagcaaggagtgagagacattcagcagcacagaaaaaaatgctataggagttcagaaatatcacttaggactggagtggatttgggaggactctagggggagctggaacttagacggatggagaacaagggcttttcaaatagaaatggccatacaaatatgtaagtagagtgctcaacaaattgttgctatgatgactaccttccaatattggccctattaatagaaatgttggcttaccaggaaaatttttttttattagaaaagacttcaactgccagtgtgttttggactggggtgaattcatctggttggctcaatcttttagtgttgacttgactctgaacaatgtcaacaactgcactgtacacttgaatcaatccaattacgtcctggctgtcagttttcttgcacaacatcctttctcaatgctgtgttgtgtaatatatgtgcaagaaaatataaacagctgattgccaggagggatttaatgtaaagtttttccagtgaaacaaaaygtaagaatctgagtttgtttttcaaagatcactaaattttagttatgattatatcacattttccaaaatgtgtggcagtttttgccctccttgctctgagtgttggtgcactggacacttttattgctgcagtatatgagcrtgcggtgatattaccaaacagaacagaaacacctgtttcaaaagaagaagctttgctcctgatgaacaagaacatagatgttttggagaaagcagttaagctggcagcgaagcaggtattascnttttatacttgtaaaggagacttgcagtttggtcaaagagtatttggaattcatgacaaacttttttgccccacttgtttcgagcagggtgcacatatcattgtgaccccagaagatggaatctatggttggatcttcrccagggagagcatttacccctatctagaggatataccagaccctggagtgaactggattccatgtagagacccctggaggtaatatcatatcattaatttctaaacaaaaagttgtgatttggtaaaacaccaacagtaaactcactgaatttgactggtaattgtgttgataaatagtcaatctgtggcataggatgtagatgcttttttttcsctgtaatttcaacttttagyttagattgagggagtacatgtgcaggtttgttacatgggcaaattgcatgacgctgaggattgggktacaatgattgcaccacccagcatagtatacaacaggaaggttttcagcccttgccttcctctctctctctctctcccctctattagttcccagtgtctattgctgtcatctttatggccatgagttcccaatgcttagctyccacttataagtgagaacatgcagtatttggttttctgttcctgtgttaacttgctgaggataatgtcctttgktgctgcaaaagacatgattttgttccttcttgtgggcacctaggttaattccatatctttgctgttgtgaaaagtgctgcgatgaacatacaagtgcacgagtctttttggtagaatgatttcctttcctttgggtatatacctagtaatgggattgtgagtcgaatggttgctgtgttttaagttctctgagaaatctccaaactgctttccacaatggctgaactaatttacatttccaccaatagtgtgtaagtgttcccctttctccatagcatcttttattatttgactttttgttaacagtcattctgactggtgtgagatgatatctcattgtggttttgcttggcatttctctgatgataagtgatgttgagtgtttgttcacgtgttttttggccacttgtatgtcctcttttgagaagtgtctgttcatgtcttttgcccacttttcaatggggttatttgttttgtttttgcttattgatttaagttccttatggattctrgatagtagacctttgttagatgcctagtttgcaaatattttctcccattctgtaggttgtctatttactctgttgatagttgcttttgctgtacagagctctttagttaaattaggtcctacatgtcaagttttgtttttgttgcaattgcttttgaggacttagtcataaattattttccaaggttcatgtccagaatggtgyttcttagattttcttctaggattcttatagtttgaggtcatacatttaaatctttaatmcatcttgagttaatttttgtacatggtgaaagataggggtccagtttcaatcttctgcatatggctagccagatattccagcaccttttgttgaataaggagtcctttccccatacttatttttgtgaactttgtttgagctacagatggctgtaggtgtgcggctttgtttctaggctctctattctgttctattggtctatgtgtctgtttttctaacagtaccatgttgttttgattactgtagccttgggtaatgtgatgcctcaggctttgttctttttgtttaggattggtttggcgattcaggctcttttttggttccatatgaattttagaaatttgtttataaatctgtgaaaaaatgacattggtagtttgttagaaatagtgttgaggctgggtgctgtgggtcatgcctataatcccagcactttgggaggccaaggcaggtggattacttgagattaggagtttgagaccagcctggccaacgtggtaaaaccccatctctactaaaatacaaaaattagctgggtgtggtggtgtgtgcctgtaatcccagctactcgggaggctaaggcatgagaattgcttgaacgatagagtgagactctgtctcaaaaaaaaaaaaaamaaaaaaagaagaaaagaaatagtgttgaatctgcagatactgcttatgtttcatagtgtatatcatctggcatatctcctgtttggtaaatgacttgagatactgatgactagttggttatttgttgcaattgtctttcaacaatagtaggtgtgaccaggcgtggtggctcacacttgtaatcccatcactgtgggaagccaaagcaggaggactgcttgaagccagaagtttgagaccagcctgcgcagcaaagccagaccctatttcggcaaataaaaaatttagccaggtgtggtggctcacacctataatcccagctactcgagaggctgaagcaggaggatcactggggcccaggagtttgaggctgcagtgagctwtgattgcaccactgcactccagcctgggtgacagtaagaccttgtcttaaaaaaatagtaggtataggccgggtgtggtggctcacgcctgtaatcccrgaactttaggaggtggaggtgggcaaatcacctgaggtcaggagttcgagaccagcctggccaacrtggtgaaaccccatctctactaaaaaatacaaacattagctgggtgtggttgtgcatgcctataatcccagctactcgggagactgaggcaggagaactacttgaacccaggaggcagaggttgcagtgagccgagatcacgccactgcactccagactgggcaacagagtgagactccatctcgaaaaaaaaatagtaggtatatacacaatttttatagtaaatgtgtttaattgggtttgaacaaagtgaaaaagttggaatatctagaacctgtgtcccaaatacaagtaagttggttcatccatggacacctgcctccttcacaggaagagtaaaaagatgaatgagcctgtttccaaagagctttgctatcactrtcattcagaatgcaatcaatatggccaatggaaattgtataggacttgaaaaaggaagccctacttctgggaccacattttacgaccacctagctgagtgatgtaagcgtataacctaaatgcttaacatttctgtttcattatctgtaaaacagggataatagagtcccttaattctcttacagatcagacaagagtaatgaagtaatacacatggaatttgtacattgtratgcactctccaatgctagctgtcactattccttttttttttttgttaacagaagggactgagtctgaacttctttgtgttcttgtcctttgagagacttyagtaattattagtagatgtaatttaggcataactttcttaaagaaaatatgcataataaatatgatatctgtgaaatagattattttagttgtattaacttttaaaaatagtttaagattatttctttaaatggcaaaattgatgggttaagaagtcatttaacttgctaattttaaatttacatgcacctgtttagaactacacctattgtgcaaaaagagaaacttctttgataattttacctatgtgaaattaagtggaaagtcatgcttaatggtacaacattcaggctcagctatgtgagtcaaacctcactctgggattttgccctttggaaaaatattctctaaacattgcatggtctgtgtttacagaaaccatgtcactatgattcaacatctacttgcttatgaggcgtttcccagaacaggaaggaatcattatttgctgcagttgatgaggcttacacgaaaatgtactgtatttgactgggctaatgaaactgacttttccagggaaaakatatccataaatttgataattagctatcgataaattattttaagttgggaaagtaggtgactgatgaaatgtcaacattatgaactcttacacctacttattcaaatgacaacstttcagttttgtgttacaraaaggagaaatccagtatttaatataatgataatattggaaaagaaagtcagttttctccctggtgatatttatccctgaagagaatagtagagaggcatgcggtcatccttgtgcatttaaatatttagaatgctgacatgtcaaacagttccatgggcttttttcaygagtaactagtaggaaatattaaataactcaaattatttagtcaagaaaagaaaaattaaacaaagtacatgataaagttattaaaggtcttaatgaatatgaatattaatagtacttctctgttttttttagaagaaaataaaaagaaaaggtctaaaccagtaggccattaatctgtcctttttattcaaaggttagtttaacctcaattgcagaggggctgtgagttcatagagagacatggaatggcctctaatcacacaatccataatagcaattttcatttactgagcacttacttggtcccaagaactgtacctggtatactatacccattattacattcaatttatgtagttggcattactatttgcattacaaatatgtgaaaaaaggaaggcttatgatctcatgattgatcattagattggctggaattaaaacagctatgtcatttaactgtgctaacggaatggactctaagggcctagatgaaccatattataataaaatttttagtgactagcaaatccacttatttaacagagtgagctggttgctaaacattttttgtcttattttctgctgaaatctgcctcactttaacttcctttcgtctttttcctgcattctatgctatgttcacacatawgacccatctcctataaattaagcctttcaaatatttgaagccagctatcaccatgctacattctcttcttataccaaggataaatatctttaatatggatggacttggtaaaacaatttcatgtctgtacttatctcaggatttctcatgtggatccactaaggcagaaaggaagctattgttttacatttgacagatgaagaaactgagtcagtacagtgaagtgctttttattttttattttaatttttaacatttccactacttacagctatatttgtttttttatagagacaatctggagggtacaaactatttactgtcacctggcatttctgtttccaaccacatctcgtatcagcaaccttgtacaaattatggcttggattatagaaaaggtcctctccattagcagaatctgctaaatttcaagtgcttcatatatcttcctgggagcacttcataagagaatgtgctgcttcttttcatcctcctcttcctcttccatcttttctttccttcagtcttgtactgtaatctggagtttggcatagtaaattaggttagctttcaggaagataaacactgtatcacatgagagttttaaaatattttctgttgattcttgacctagagctgttgtgttatgggcaatgggcaaataaagtatcactttggtatttcagaaatcactaaaatatagtaagtttgaggaaatgtctattgaattagattcggcaacacaccagtgcaacaaagactcagctgcctggccaaggacaactctatctatgtcgtggctaatattggggacaagaagccatgcaatgcyagtgactctcagtgtccccctgatggccgttaccaatacaacactgatgtggtgtttgattctcagggaaaactgttggcacgctaccataaggtgagcatcacttgwgccttagctcaacttgttacttcttctgtgtgcttgtggtatgtatgtgtgtttgtttgttgaatgttggggagagaactgttatagatgcatcttataattattacatcatagttgaaaaggagatttaattcagttccatataaccgttctgggtttgcatttatcataaaacagaatatggtagagtatttaaatggatgtgacaatagccacacaaagcttttaatgttctctgaaaaagaagtaaacattctgtttcattcatgatttaatatcaggttcattttttagcccaatttgttagcatttcatactaagctaccatgtattccattaggacttttttgattgcaatgaaaacaaaacctcaaatgaaaatggctttaaaaagatggaaatttccttgcttatgcacatgtaaaaatgtgtatcatagaaaggacaggtctcatttcagtgcagtctgacactcagaggctccaaagttatcatccacccctctagctctcctagccctttgttacagcttctttctcaggggaactctccttttagaagccacattgctggagcaacacgaaattcacatctttatcaacaaaatctacaggaagggtgtatttctccctcctagaaccttgcaaaggccttatcgctccttgattcaattaggtgacgtgcctttcctgagctaatcaccaaaggatgagggataggctgccacatgggaggagaaaggaggagcaagaggcctccatggaccacagaggtgggaagtagctctccccagagcacacacatgcacacaacaggccaaacaaaaacctgagcaaaacatatgctgtactcctgagcccaggttaagtggagttttggaaaaagaatcaggctgaaaaataaaataaaattatgaatggcttactaattaataatatgtagcaactgcattgtctaaattaattttcaatggacttcacttctataaacctggcagtatcattgggacacatgacaaagtttattttattaacatagtagtgctgttgaaatttaaagaatatagtggaaaacaatctgagaagtgtaggattcaagatttcaacctgtgattttaagatacacattttcacattttaaatatcatttgtacatgtggtttcattcattggttgtaaaaaaaataaagtttttttattaatgtcacagtaagaaaatgtatagatggtggtatagtggggatgatttttacaaatgtatrtgtaacagttttattttgttgttgttgttgattttggaaatggaatcttgctctgttgcccaggctggagtgcagtggcgcgatctcggctcactgcaacctcggcctcctgggttcaggggctccccctgcctcagcctatgagtagctgggattacaggcatatgccatcatgcctggctaattttttttgatatttgtagtagagacagggttttaccacattggccaggctggtctcgaactcctgacctcaagtgatccacccgcctcagcctcctaacatgctgggattacaggcgtaagccaccacacctggcctatgtgtaacacttttaaacctgcatgtcaacatacatgagaggaaagatttaacggggaaagacttaaytgatcacatctatttggcagttttcttattaattttcttcttctttgctttttattaacagtacaatctttttgcacctgaaattcagtttgatttccccaaggattcagaacttgtgacttttgacactccctttgggaagtttggcatttttacttgctttgacattttttctcatgacccagctgyggtggtggtggatgagtttcaattgacagcattctctaccccacagcatggtacaacacgctgcccctcctctcggctgttcccttccattcagcatgggccaaggccatgggagtcaatctacttgctgcaaatacccacaacaccagcatgcacatgacaggtaactcacgcgggcctgcaccaagtgggagtgacagtcttaggaaggcttcattgattttcaagccacaaacttttgtttaataactttattaccaattttaacatcacaaaattaataatagcatttgttcctacttaaggaacgttcattgtccttgtgaataaaagaggcaaacattattatctcaattttacttgaaaggaaattggagctggaggaagtcatgtaaaaaaatcaaagagagttctaagaaacttcctagccaatgtgcattagtaatatcgaaataagtctggttgtttaaagagataacctacagagcagaagaaaatatttgcaaactatgcatttcataaaaatctaatatctagaatccataaggaacttaaacaaatcaacaaacaaaaaacaaactatcccattaaaaaatggacaaaggacatgaacagacacttctcaaaagaagacatacatgtggccaacaagcatgtaaaaatgcttaacatcactaatcattacagaaatgcaaatcaaaaccacaatgagataccacctcgctccagtcagaatggctatgattaaaaaataaaaaacaaacagatgctggcgaggttgtgaagaaaaaggaaacacttatacactgctggtgaaaatgtaaattagttcagccacagtggaaagcagtttggcgatttctcagagaacttaaaacagaactgccattcgactcagcaatcccattaataggtatataccagaaggaatataaatcattctaccataaagacacatgcacttgtatgttaattgcagcagttttagcaatagcaataacgtggaatcaacccaggtgctcatcaacggtgaagtggataaagaaaatgtgatacatatacaccataraatactacatagccwtaacaaagaatgaaataatgtcctttgcaacaagatggatgcaactggaggtcattatcctcagcgaatgaacacaggaacagaaaatcaaatacctcgtgttctcacgagttgaagttaaacattgagtacacatgaacacaaagaggggaacaatagacaccagggtttacttgaggggggatggtgggaggagggtgaggattgaaaaactacctattggatactgtgctcactacctgggtgacaaaatcgtttgcacaccaaaccccagcaacatgcaatttacccatgtaacaaaccttcacacgttccccttctatacctaaaataacagttggaagaaaaaaatacaaacaaataaaaatatttcaagcattaaaaaaaacttgttgaagtgataaaaatctcttttgacttaatcaggtttttagagtttctcctttatcatatccatgttcaaagtaatgcaggcttcctttttaactgttctgttatttgttgaataacaaatcccaaacacaaataaactaaatcgtcagtggagagctaaaattattcttcacgttgggggattttctagtttgttgctaagttagcttaaaactatgccccccaagtcaaatgataatttcagtgcaagtagtaccttatggaggacacagagtcaaattggaacttaggccaatgtaacagctatctccttaactatcttgaaaatatgctttaataactttgtatttaacttcacatgggaatattctattagttggtcaccataacaaatctgaaaccaatgtttgtatttatgttgcttgtagggagtggaatctacgccccagaagcagtcaaggtgtaccactatgacatggaaacagagagtggtcagctgttgctatcagaactgaagtctcggcccygccgtgagcccacctaccctgcagctgttgactggcatgcgtatgccagcagtgtcaagccattttcctctgaacagtcagattttctggggatgatttattttgmtgagtttacctycaccaagcttaagagaaatacaggaaattacacagcttgccagaaagatctgtgttgtcacttaacttacaagatgtctgagaagcgaayagacgagatctatgccctaggtgcttttgatggactgcacacagtagaaggccaatattacttacaggtagaaatgctttaatatgttaaagtggccttattatcagtttttcttctaggtcatcattgcctttctttgaaaattgggctggatttagctaattttataattagtaatgttatatttatctctgaattttgtccccagaacacattatttgttcagtcttagcaagaacagaattagttcttttagttgaaaggcaaaaacataaagcaaattgattagttctcagcaggccaggttcaggtttcaaaagctgcaatttctgtgtattctcttttcccgtcaggttactttagagcagtgtttttcaaattgtcttcaactaaatccagagaaagaaggatattttacctcataacccagtgtagccaagtggatgtgtgactgaataaaaaaaaagatatttaattgaaatagtttatgaaataatttaaaatagaattagaaatagctattattatgtgcaatgcactctgatttttaaaatcctagtctattctatttgacttcagtataaaaagtgttaatcctgacccactatattgaytttaggattcattaataagttgttacctgcagtttgaaaaatacttcttatgaggcaatttaaatatgcatttatagtytgaaattgcattatttagctgagaaaatatttgcaagttttctgactccttctcttttcttttcttccatagatatgtrcattactgaagtgtcaaaccactgacctggaaacgtgtggagaacctgtggggtcagcttttaccaagtttgaagacttctccctcagtggcacatttggaacgcgttatgttttcccacagatcattctaagtgggagtcagcttgcccctgaaagacattatgaggtaggaggtgtgcaggatgataaattcctttgagcagagtagatgggtagagcagcataatgaaaatctttgaaataatgagagtatagcaatatcgtggttcacattctacaagaaacaccttaaatatgtggaaactatgatatggaatataaattgtggttttagattgccattaggctgtgatggagaatttggggttcatttttttaacataaatgtgatgttgatattcaaggcaacaggaaattcacagagaagctaaaataaaaatgttgactgctgataatggcaataatgttgtcatttgcatggtgtagaaggtgcaaattaaatacattaaataatgcatctacaacttattttctgggtatactattttgagaagttgttataattatagtaataactaatattttgtatagtgtttcatgagtttgaagaacatatttttatacatattatttgaccacctgtgcaacaaatttgttggctgcactttcgcacaaagtccctctactttcagacttgaaacatgaacctgggtcttccaacaccaaatcctgtgtgatttttaccattctacactgctttaggagggagtgatcttgcctgagaagggctctaggttgtaacctaaactctgcactgaagttaaccctttgctttctttgaccagatttcaagagatggacgcttgaggagccgaagtggagcccctttgcctgtcttagttatggccctgtatggaagagtgtttgagaaggaccctccacgcttagggcagggatctgggaaattccagtgatctcctttagcagagcccttttaggattagcctggctaagaaaggaagaaaaaaaagagatccgttagtgtctgtttagaaaagatgttataaacttacagaaacaaatataataaactgaagcagatttgaaaagcaacaagtgtgtgtgcaaatttcacattttacatgtttggtatagcacaggttcatttatgggagccgcattcatcctccatgtatgtgagtttaagtatatgtaagtatgtatatgtatagtggagcgtatatttaaataggaggaggtcctagaaaaatccttttgcagtaactgcactaatgtatgcaagtgttgtttccatcatatgatggttaattttatgtgttgatttgactgggtcatgagatgcccagatagctggttaaccattgtttctgggtgtgtctgtgagggtgtttcaaggaagagaacagcatttgaattggtggactgagtaaagcagacggtcctccccagtgtggatggtcatcgtccagtcccttgagggcctgcagagaaaaacaagaaggaggaggtttgaattcattttctgccagactacttgagctggatagagatcttctcctgccttcatgtgctcctggttctcaggccttcaggcctggactggaattgacaccatcaactcttcagctctcaggccttcgaatgacacccctggctttcctgcatctccagcttgcaaatggcagaccagactgtgggatttctcagccttcataactgtctgagccaataccttatcataaatctctttctctctctctctcctgttggttctgtttctctggagaaccctgactaatgcacttcatttgtaaatacataggatgaactttgaatatgcagagggtatttgattccagccaattaagatacaggaaattaaagaataaggacatcttttaaagtaactatgaacaactttttagctagtattgtccctttagtcatgactaatttgactcctaagttctatttatatggaaattggatacttgaaatggatttttttttttttaatttttttgagaccgagtctcactctgtcccccaggctggagtgcatgcagtggcacaacctcggctcactgcagcctccgcctccctgtgtagggaaaagaaagagagatcagactgttactgtgtctgtgtagaaaaggaagacataagaaactccattttgaactgtatcctgaacaattgttttgccttgagatgctgttaatctgtaactttagccccaaccttgttctcacagaaacatgtgttgtatggaatcaaggtttaaaggatctagggctatccggggtgtgccttgttaacaatatgtttacaggcagtacgctaggtaaaagtcaccgccattctccattctcgattaaccaggggcacaatgcactgcgaaaagctgcagggacctctgcccaggaaagccgggtattgtccaaggtttctccccactgagagagcttgagatatggcctcttgggatgggaaagacctgaccgtcccccagcccgacacccgmgaagggtctgtgctgaggaagattagtaaaagaggaagacctcttgcagttgagataagaggaaggcctctgtctcctgcatgcccctgggaatggaatgtctcggtataaaacccgattgtacatttgttctattctgagataggagaaaaccgccctgtggctggaggcgagacatgttggcaacaatgctgctctgttactctttattacactctggcctacatgcacatccaggcatagtaccttcccttgaacttatttgtgacacggattcctttgctcacatgttttcttgctgaccttctccccactatcaccctgttctcctgccgcattccccttgctgagataatgaaaatagtaatcaataaatactgagggaactcagagaccggtacccatgcgggtcctctgtatgctgagcgccggtcccctgggcccactattctttctctatactttgtctctgtgtcttatttcttttctcagtctcttatcccatctgacgagaaatacccataggcatggaggggctggtccccttcatccctggttcaagtgattctcctgcctcatcctcccaagtagctgggacttcaggcacacgccaccacatctggctaattttttatatttttggtagagatggggtttcatcatgttggccaggccaggctggtcttgaactcctgacctcaagtgatttgctatccttggcctcccaaagtgctgagattacaggtgtgagccacagggccagccaaaacagaaattttttgaaaaataaattaggtcagctgggtgcggtggctcacacctgtaattccagcactttgggaagctgaggtggacagatcacctgaggtcaggagtttgagaccagcctggccaacactgtgaaaccccatctctactaaaaatacaaaaattagttgggggtggtggtgcgtgcctgtaatcccagctactcgggaggctgagacaggagaatcacttgaatccaggaggcggaggttgcagtgagctgagaccgcatcattgcactccagcctggggcaagaaaagcaaaactccgtctcaaaaaataaataaataaataaataaataaataaataaataaaataaattatgtcgttcagatcacatctcatttccttctgaaattattctgttctgaaatctacccaatcttggttgagcccttctcagtggtcaggggtttattgcaggctgtgccaggctgggagcttcctagacaggaccaccatgtcaccttttccccagatacctctggcccactgtcttggctctcttagtcatttttctggttggtcactgattaactctggaaagagatatgctgaagagcagctgggttctctgggttatgtaggagacacctctttgtccacagaatgtttgacaaacgcatttctgaacttttcctaggtgtttatttccacctgctataattcagtccagtaccagtaagtcagagatattctgggtggcagaaaatgcactcggtttccccctcccatttttcctggattctctcttcagggactatcactctcggatcttaggtttgtgcccccgattcctctgtgtgcagtaggtgggcatcttccctctttatcgccttacatttgttccttctagaattctttcttctctttcctaagccagttgtctgtaggctgcattatgtactctggttgccccagcttccttggcacctctcacctcatggcatttttatgtaagctgactcctgcccccctctttattaaaaggaactttaaaatcaaatctcggggcaggctaccataactcacacctgtaatctcagcactttggaaggacaaagcaggcagatggcttgagccaaggagtttgagaccagcctggacaatatggcaaaaccctgtctctacaaacaataacaacaacagcaaattagccgagtatgctagtgtgatcccagctactggagaggctggggtgggaggatcacttgagctcaggagttggaggattacttgagcccaggagatagaggctgcagtgagccaagattgtaccactgccctccagcctgggcaatagagtgagaccttgtctaaaaaaaaaaaagtcaaatctcatggtcagttctcagctcttactaagcctgtacttcttggagtaattttaccccccacactttaatgcctttcgctttttattttcgttgacctttttgtctcttctccctcctccaaccacatttattttgtttgtcattgatataaatgatgcactctgctagactcagctctcacagctgtatcttccttatctaaaatctttctatggatagtgaagccactcttatggctttaattaatatttctgatacagcagagtataactcactggtaaacaaaaaaattttttctttcatgagagcaagttcaagccacatcatcatgtttacaggctacattaacaatgcaaaaatagttttattaagtcctatgcagagatatgtattattgtaacattagcaacttgtgatattacagttcctggcttataactcccatatcctttgttagggttttttttttgtttgtttgtttgttttaacattagggggttttaggcctcaggagcaggcctcatgaaacagaatctccctctctgaccttaccctgtcctccctttacctacctaaggcaggactataatctgattgtggctcaaaagaccctcatttcagagagggtcccaccccataccctagaggaagaaatgctataaagagatgtcaagacaaacctgaacagacaagctttactgggtttccccactcaaactgttagtatgggatcataacctttttgtccaatcgcatttctacatggttgtcaatcgtgactatgtaatgaagcttccataaaaacccaaaaggacagggttcggagagtttccttacagctgaacacgtggagggttcctggagggtggcacacctaggggtgcgtggaaggctctccagtccttcccccataccttgctctatgcacctcttcatttgtatcctttgtaatatcctttacaataagccactaaaggtaagtgtttccctgagttctgtgagccactctagcaaactaattgaactaaaaaaaaaaggggtcatggaaaccccaacccagagccatttggtcggaagatctggaagcccagacttgttactggtgggaaggagggggcggttttgtgggactgagcccttaacatgtgggatctgatgctatctttggataaatagtatttggattgaactggaagatagccagctgatgtctgatgcagagtcaattgcttgctttctagtggggagaaatctccacctacttgggagtaaccagtcttttgtgttagttgttgtgctatgagaccagaggaaaaatggattgtttctcctaaaaccagattaatgtcaacaaaagaattgacattgtgttgtagccactaaatattaaaatatgggcgtatattttgagtagcaatgcagaggccgactgccaatcaatcttttatcagacacaagtatatggacacacttttacatgctgtgcacatggcttttcagagttcaccaggtgaagtgcaagaggcagtgcccactccactcagtccttgctcttccctccttttcccttgtttctggttctctctgcgtaagctgggcaggacttgcttctgagttcctctggggacctgctgcctggggtggggtgatcactgctgtgctagcaaaatccagaatactgtgggtcttgccctattctggacagtgcgatgtcatgttttccttgcaaaaggcaatctgctccatctatgcaagtttggttggaggagtctggaggtatcaattagggcttttgtctacactcaaagtcatttccttggagacaattctcccagtttctactttgtgtgagcagaagggctgcatttggggaccttggctggctgtagcagtagggttaaggatccagagaaccagcctaggagttgtagtagaggctgctggtgcctcccagttccatgtcctgctgatgatactctactgcaagaactgcactgtttctatttctatttctttctttccttctttctttcttttttttttttgagacggagtctcactctatcaccaagctggagtgcaatggcgcaatctcggctcgaggcaacctccgcctcccgggttcaagcaattttcctgcttcagcctcccgagtatctggattataggcgcccccgccccccacactgctcccttccatgcccagctaatttttgtatttttagtagagacagggtttctccatgttggtcaggctcatctcaaactcctgacctttggtgatcctcccgtctcggcctcacaaagtgctgggattataggcatgagccaccgcgcctggccgaactgcattatttcatctgaagatttgctctcagctagtacatgctaagtaggccagaaagggtagattcatgtggcagtga

SEQ ID NO: 93944 - DNA, 12931 bp, Homo sapiens
acatttacactgcagaacaaggcctcggggttcaggttgtttggctttggaaatgagtaaaaggcatcacccagatttatttctaaaatgggcctggaaaatgttcagggaagaatttatttttgcaagtaggcttccgccagacacagattgtatcttttgggaaaatgctgtcctgactaatgagggaggggaggcaaaaagtaggatcatgcgttttagttcaaggccattgctaagcaggggtctggggctgtgagagtaactgggggtccaggaggggcttaggacccagcccatggaggctgaatggggctgcaaagggcatggcctgagcacttttctcctgcggaggagccctctctcttacttcgagtaacagctcttctgtaaagtcaggtggaaagtggattacaggatgtcgaatcccatctccaatgcaccaggaaaccctctatttagggagcgcatggctctccatcatctgagacagaactgcttaatgagcctgaatgtggctctagtgcctcatcctttccatatgaacagtggcacaggttctgctaagcaaggatgagctccctgggcagaggtctctccttcgaggtgaggagcaagccgaccgcagaatcctcaggggccttaatctcccaggggctctactgacactgaaggtggccatggcaatacatccacctcatagtagctcgtgattgaaaaatgcatcagggaggtctggggaaagtatcccgtcaaagaagcctgcctcactcccctttgccctgtcctcctccctgggcctcttctgggtgctgggggaagggtgggtgcaatgcagccagcgtacagagggaaggtgctgtgcccaggttttgcccacattaagggtgcaccatgaatgtgcctttggctagtggcttcttgcttgttcaccaggatctggacaccccaacccatggacccccagtcttcacagtggctgtggccacttagtctctactatccagtgtcctggtgtagccccagtcaccatcccctccccccgtccctcccgccctcctaacagctgtgcgtcctctgcatttccatccatggtcctgcttcccacctatcctgcactccatgaaggcagcaaggggggtctgcaagctattttcaagatatcaaaaagcccagaggaaaccatacatttacctcaatgacgttcccagactaaataaaacattaagtttatttgctttgggctggagtcatatcaactcagtgtggcaactatggttatctygactgatcagaagccctaattggccgttggatgtctttgataaataaaactcaaagaaataaattattattcaataaattgtagtttgttaggtagttaaaagcctttaaaacatggaatcccttgaggaaaggactaaaaaggttctttttgtggtgagaggggtgggaacgtctgatctgcaccaatgtcatatttgtattaaaaaaaaaaagcacacgcatttttccataaccctctgatgccagatttttcactggtgagtttgacgtcacagcattcctacgaataatatgttgttcatgcccgctttacccagagtgtgattcaccaaacactgctaataagtgtttcttgggagttcatacgaaaggatccgtgatcaaaaacatttgggcgaaactactaagcaaaattaaaccatttattatgggattcttcagggttaatagagagaatctgaattgcaaatccacgagaaggagatagaggatgcggcatctccagctgctagccccaggatccattttacaaagcactgtttcaagtaacaagtgttccaccaagcacactttggaacacacaatgttcctgatatgatgacataggtgactcaagaccccactgacagccatagggacagacaaaaataaagaggaggaagagagatggcaaggcagctgaggggcagaggcaaaggcaggccccaggacaggttgggcattccgagcatccctgctgccagtgctcccaggactggacacttgctcccctgcagaatggagctgccaacaggagagaaacgggtgtggctgacaggccatgccatcccagagacgtggactcaaaagaaatagctcaagtgaccccagaaggttttgcttcatttcatctccagtcctcatgtcatcgcctgtgaaaaccacaggaagtgggagtgcaccttacaagccaccgattcctcccttcttcaggccctcggaatgactctttcctccggggtcacccagcacccgcgctgggcagcacccagctcttctgtgtggcagaagagcacacaaagccacctcttggcttgtccacagcacacacgacatgattctccatgtacagttacggttgtggctatgtgacaggtccagatgtaacatgaaaaattaagtgacacctccagatgttccctccacatacacacaattccaaagaggcaagaacctgaatagtgcagagaaggccaacatggaaggggagagtgttggtgtgctcctcaggaggccttctccaggcagatgcacagacattgggctgggtctgctttctggacctcctttgcagggaaaaaatgcagcgcctccccaggagagaggagacagtgcctggtaggcagctgcacagggaaggaacaggggaaaaaggaaaaggacacacattcaactcccgtgacacaccaggccctttcacccatactcttctttgtttttgtcttcattttgagatggagtcttgctctgtcaatgaggttgaagtgcagtggcgccatctcagctcactgcaacctccacctcctgtgttcaagtgattctcctgactcagtctcccgtgtagctgggattacaggcaccctccaccacacttggctaatttttgtatttttagtagagacagggtttcactatgttggccagggtggtcttgaactcctgacctcaggtaatccacctgcctcagcctcccaaagtgctgggattaaaggcaagagccactgcacctggcccccatattcttttatttcaaactcatagatgaccaggaaagtagctttattaccctcattttacagatgagaaaccaaggctcagcaagatccatggataattaataaggctctgtctggctccaagccccacagctgccccctatgctactctggctctaggaaatcgggagacttgatttcctttaaggaaggtggcttcccggccaagaattctgtgagaagacccgggagacacagcagagaagctgaggagggctgtttcagaaggaagctgacaagtgcctctgtgatcctggcttccccggtgtctgaggaagagaacatgaggcaatggcagaacaaacaggcaggtgcaggctgatggcccccaaggctctggccagagaagaggccatgccactgactcttcgggttgtgccatttgaatttgcacaggctcagcaatgatgtgttttggaagtagttgaaaagcttcaccaggaagaatctagaaattatttccgctagtgttttctatttgtgtggaacttttccctctgtatgccaaattcatatctatattctcttcttattcatgtgaatagtcctggaggtgatgagtagataagtaagtaagtagcgtctccatctgacagataagcaaactgcggcgcaggaagcgagggaaagacrtcatttacgcctgacaactggctgatggacagaactcttactttcccgtctttgtaatgcagggcaataaatatctagtctagaaacaactttaagatgaaccactgagtgacctgaatagctgagcccagttaacatctgtagtggaatgaggactccaggctcccggcaccagagtcccagtttcttgtcctcctgccatcccgtttctagacttaacttaagaagtcaccttccatagcttccaaaggctttccacgccaagtggcgtcctgtctttggaaatgctttctggtgtactgagagatgatcatcaagagtcacactgaccaggattcagtgacttcatgcgcaagctatcttcctcccagtcagtttctggaatttacccagaggtcttgtggaaccacacgtcgatgactgtttagtaaattgaccctggcgttaacggtaaatttaatgccagcacttcttcccagcgaccttatttgttgagtcagacttaattcgatcacaatctttctgagatcaaggatccaagtccctgggtggtgtgtctctgagggattctcagactgcgtactgcaactcaaatgccttaagtgatgggaaaaaattctgccaatcagcagtttggctgcctttagtattattatcattatttttttacacagtgaactcaaccacgtactttggaaggcagacattaatttaccattagttttccatgagtgttgtcatcaaacactggtaggactgagtgaaactgaaattcatctgaaggggaaaacattctaaaatctctgatagggacaagcagccaggttagggcagctgaattttggagctcagtgatttccatttgttattgacacaacttctattctgtgagaatagaaaagggctgattatgaagttccttatcacatgtcagtgacagacacgaccggcattttaagacacaagaagagagagttatagagttatcaagtcatgaagataaggaaaaaagaaacaagatacgttaaaataaataagcactttggagcccacatcaagtaaacaactctttttaattaagaaagaaatttaaagcatgaaagaaaagaaaasgggcttaaaggcaatttctcttagtgtgaggtattttcaggaaagaattgggscaaccaaggattattattttcttaagcttttgattgaaatctcagactttcatcccttcttcagttagaaaatcaagagaccaggcactcaacctccaacgaggggaaactaaaggctgaaaataagctgaagttatacagattcctggggggcggtcagtgggagggagatggctgctcaaccaatcttcttagtaaccgggtttttcctgcctggccttctgccttggccacacagaacatcagatcatgtctgactccacacctgcccttccaggattcctgccagagctgtcccctcccagcgggccagcctcaagccctccctcccgcatgctcggtcaagctctcctccgtgcagctgccaggggcagctgtctcatggccacgtgtggctctgccccctggtaagagcacagactccttggggcagagtccatttcttattcttttttttttttttttttttttttttttttgagagagactcttgctttgtcgccaggctggagtgcagtggcacgatcttcgcttactgtagcctccacctcccgggttcaagcaattctcctgcctcagcctcccaagtagctgggattacaggcacccaccacctcgcacggatagtttttgtatttttagtagagacgggggtttccctttgttggccaggctggtctcgaactcctgacctcgtgatccacccacctcggcctcccaaagtgctgggattacaggcatgaaccaccacgcccgccccctttcttaatctttacagacatcccacatacaagactgctgaacttggcttctgaacagtacaggtagttcagctccttgccaggtaaaaagaattcactaaaatctcaaacattaaaaaaaaaaaatctgttttcccattggggaaaaaaactctcttggctgcgtaggggtcctttattaagtccacaccatgtaatattacacaaccattacaaagaatcagtagggaccgggactgaggtggaggccagggcagcgcatccaggagcgaagtccgcgctcactgctgccatgtgggacagctgagacaaggatgtgtaccctgcgcccccgcgccacatgccagcactgtcatcgcagacttggctgcccaaccccgtcgtctacctgatgaaggccttcgacctcctagtggaccgaycggcgaccctcgtgagagtttatagagtggcagcacgcaaagaacaggtattactactaccaccggcagtactgccgcgtgctgggcatcactgagcgcaaggagaagaacatcttgtgtgtcaggcctctgagcccaagctgagccatcatatcccctgtgactggcacgtacacatccagatggcctgaagcaactaaagatccacaaaagaagtgaaaatagccttaactgatgacactccaccattgtgatttgtttctgccccaccctaactgatcaatgtactttgtaatctcccccaccctgaagaaggttctttgcaattctctccccacccttgagaatgtactttgtgagatccagcccctgccagcaaaacatcgctccaaactccaccgcctatcccaaaacctgtaagaactaatgataatccaccaccctttgctggctttcttttaggactcagccccctgcgcccaggtgaaataaacagscttgttgctcacacaaagcctgcttggtggtctcacgtgtcttcacatggacacgtgaaacactgtgcatatatgaagccgaaatgcagtggaggagggactacaaagtcgatcaagaaatcgtcaatattatccaggagcggctcaagacctgtcagtagtgggaagaagacaactacaggtagaactgggccaaggaagtggagcattcacccaggtggccaaggcttaccaggaccgctatcaggacctgggggcccaccattctgccaggaagtgccgggccaaacacaagcagaggatgctggaagagagaaaagctgcaaaagaggccaccgctgccgcctcctgaggcagctgtggatgcccctgctgtatggctgtgcttgactgtctctgtgttgctgaaataaaaccctgcaacctggaataaaaaaatgagtaagaggcagggcaaggtggcccaggcctgtaatcccagcactttcggaggctgaagtaggcggatctcttgagcttaggaatttaagaccagcctaggcaacatgtcaaaaccccatctctacaaaaaaatatgaaaattcgccaggttcagtggtgcatgcctgtagttccatctactcgagaggctgaggtgaaaggatcgattgagcctgggaggcgaggctgcagtgagctgtgactgaaccactgcactccaacctgggcaagggagtgagaccctgtctcaaaaaaaaaaaaaaaaaagaatgaacaagattgatatctactcatctgaaggtatttttcacagtgtatttattgttaggtgagcaaaacaaatagcagagaattgtatacggtatgatccaatttttgtcaaatagtgacaaaaaggaatgacaacctttatgtgtgaatatgtttgaatgaacaaggagaaaagcagttttcaatagctggtacccaggctccaggcatagggaaaggaactgaaaggatgtaagaaaaaagcagttttaaagaaagcacttacaaataagcacaaaaatgcatgcatctgtgtagttattgcaggttatcacgtaaaagtaaaattaaaacatccacaaaccgttaaaggtcaactttagagttttaaagtaattgtggtacaaacacactttgaaatttctcctgcctgtaaatgaagacagaagaatgtgaggggaggagggacctgagcgggggagggacaggagggagggaggaacctgagtgggggagggacctgagggagggagggacacgaggataggagggacctgagagggggagggacctgaggggggagggacatgagggggtgagggacacagcggtgggggaacacaagctgaggagggataggaggttgggagggacctgagggggaggaagacacgaggcggggagggacctgagatggggagggacatgaggaggggagggacctgtgatggggagggacatgaggaggggagggacctgagatggggagggacatgaggagggggagggacctgagagggggagggacacaaggggaggagggacacaaggggaggagggacacaatagggggagggacataaggggagagggacatgagtgggggagggacaggaagtgtggagggacgtgaagtggggggacctgaggggggagttctgactgaggaggaggagcacagggtcccagttgaggggaaggacagttaaagacagaaaacaggttttctccttttcctttctcctcctcccttttctcttcacctcctcccctcctttctttctccccctctgcaccctcccctcttcttcctgccctctttctctccctcctcctcctccaggaaactctgcctggctgagtgggatctgttctttacccagggcgtgtctgtctccagggagctgatgagcctctagggagagggcaggccaggtctcactcctcctcctgcccttcccaggatctgtgagataagtgacatgtcatccaaggtcacaaaatttattaacccaaaaaacaggcctaagatcccactccccccaacccacaggcccaagccactgcatcaggtggctggaagacatcaacgtgggcagatgttctgactgatcagaaacccctgcggcaggaattgctctgcgggcctctcataaatggaaggcacccccagtcccgcctccctgggagcccattgctgagttttcattttcctgctgggagggctcagggagcactgggtcctggcactttgtgcctcagagacgcttccaaacaagctgcctggtcctttgaccacatggtggctgcccgggaacaccggttggcttcctctacctctccgtacccttcctctggccacagtatgtctccccaagggctactaggatggagggtgcctggtggggggcgggtaccctgccaaggcctgctccccacccaccgtggcctctgcctgcgagaactcaaaggggttacagaagtctgcaggggtccccgggagagtctccaacaccccttccccatgctcttgagctcagcggatgccccgtttgtttatttgcatgagctagaaacttgggactcaatcctgacaattccttctctttcatcccatgggaattcatggccaagccttgcccttttcatctcccaaatgccccccgagcccattcctctctcaccgtccctgtccaagttgcccccatctcctggctggacccctgcaggagccccaggtgcacccctgtttctcttctgcctccctcccagccagctgactggggttgtctggagtctggaggggaggccagggggtatggctccttcaacacagtttctcccaggcagctggggcggagacccagtgctccaggccattctccactaacagccagcatgattgtcctgaaataaaaattggatctgttactcccctttttaaaccctcaaaggattcccagatggctcctctgatcaagacacaccgtctacctctcccagcctcaagaggccagcccagcccactcaactctcctgggaacagctcccttccatgcccccagctccgtgttcatccttccagaccccaggcaagctctcaggaagccgttttctcttccttctttacccttccctgtttctaatcacgcgtgggtgaacgtgatcatttaattcatgtcttcccgtatcggaatttgtcattgtcacagcacacgctaatcattccagaatatttgttgaattgaagggctagcgaattgcaatcgcattcaggtgaaggcagtgaccgtggatacgggattggaaagatcacgacccccaaactcaggattccaggaagggttcttgaaaagggggccatcttcattgacagctgaaagactaacaggacgtcttcaggccagggcactggggtaggaggggtattctttgctggtagcaggtgcgaacaaggccctggcagctgggaggatagaacaataagtaatccacaggaaatggtgagagggagataacacagaaccgttgggctgggatcaggttacccggagccttcagctcaaagctgagaaggctgggcttggtgctgtgggccacgtggaatcctggaacgctgattttagcatggagagccccttactggtattcctagcacaggtgcagtacacaagcatcattgctggaagggacccaagctcattcaagctcagcccttttacctggcagatgagaaagttgagagagagagtgactttctcaaggtcacacagctgacagccagtgtggtactcttttctaaacaaaagaaggatcatctcaatcaggtgtccacctgatttgagctcctcatcattctttctccttgtcactcccaacagccaactttcttttttctgatgttggaaaataagtttgttcataaaagtattcctcctggctcctgctctgttggccctagctgcttagaagacctggcttcccggcctaagtaactgtatgtactcacatataaggggacctggttcagtccctccactctgtgtaccttactttccagtctatactgctaaccccaggcttccaggagaatcaatgcagggaaagccctctgcctcgccaggcataatacagatgaatgtgcaaaggccatgtggcactcttggactaataacttcacccagccagcgaggcccagaagtggccatgaagacccttttggaaactctgacagtaactctccaggttagcctagctagacataccttttcttttcttttcttttctttttttctttctttttttttctaagagaagatctcattctgtctcccaggctagagtgcagtggcacaatcatggcttactgcagcctcaaccgcctgggctcaagtgatcctccagcctcaacctcccgagtagctgggactacaggcatgcaccaccacacctggctagtttttttgttttaattatttgtggaaacaaggtttcactacgttactcaggctggtctcaaactcctgggttcaagtaattctcccacctcagcctctcaaagtgctgggattgcagatgtgagccagtgtgtcaggccttagttagccatttctaagttatttttaacacctgtcctcagatgtcacaaagaagcaaatggtggtgccagggcacctgagccactggtgggtttcgtccacgcgtgaggatcaaagaggaaaagaagaaaagcccgccaactgcagcccgtcacagttcctcttttaaaccctattagatcatatcgtccccaaggattgactttgttcctgcttaaaggacttgtgagtcattattttttctgaaaacttactttacaaatgaaggaatccccatagcaaccgttctacgtccttggagccaagagaaggaagtacagtgagagactctcggtctcctgaggagccaaggcctcttgtttaccgacgtctgagagaccacgaaattggcctgatcttcagatttcagttgaggcagaggctaaaaggaacatctacatggagagcatagccagggatgtcagcaccagagcaacgcgtagggagcgcagaggaggcctgggccgccttgaggtctgcaggccggggaggccgtcacctgatctcttcaggaagtgcctgggcctaggcctggtcccagacccctccccaggctgctctgggggggacttccctcccttccctttcttccctttccaccttcctttttttccccttgtatcacaaagcatctcctctgtccttgacagaatgggaagagaattggaaaaaccaccacaggtcactgttggtctctggcgctcaattcatggggaggaaacctggctgggcgccctccttccgggcgagcaggaacggaggggctgtgctggtcccagtagaggagtggggcatgtgtgtgtgcatgtgtgtcatgcatgtgcgtgtgcgtgcgtgcatgcgtgtgcgcgtgtacgtgtgtgcgtgcaagtgcatgtgtgcttgcatgtgtgtgcatgtgtgtcgtgtgtgcgcgtgtgtgcgtgcgtgtgtgcatgtgtgtgtggatgtgtgtgtgctgtcaccacggtggtgacggcctggtgccatcagctctctagagagcagtccttctcttcccacaccacccgccactgctcctgccgccctcccctggaatcaactttgacgagcacctgtttatagcttcaggggtttctacagggccccggcaggcaagtggccaagatgggcttcaactcctgacacaggaactctcacatgtcctcccacccaccagcccaccctgaaacctccaaggcacagagaagcaaggggctgggaagtggagggtctgggccgagcccagctggaggcagagggcgctttcccaccgtctgggggtgcgcctgtccctctcctgttaggctaggtgccttccgcggcccacctggtccacaccaccctcctccgttctgggtccgggtccgttccggcctgccctactcaccctgaccagccacacccactttgctttggggcttctcatggggagcccagtggaagggaatgacagagtctcaggctgggtggggcatgggtctcctgagcacggcccgcccgccgcctcctggcttccatctctcacagcaggagcagggccaccacctgccgcctgagcctgtgccagctgtttcccactcccgcagaacagaccctcacctgggggttgggtttgccctcccctgcggagggagggaaggaggggagcaggaggatggggaggcacagccaccccggcggaggggtaggaaacccggatact

SEQ ID NO: 93945 - DNA, 13100 bp, Homo sapiens
caggaaagaaaaaaaaaaaaaaagtatcatgggtggaatgatagtgtaaataaaattgtcagttctccacatattaatctataattttaataaaaatgctaccaaaatcacaacagagtcttccggtaggacataataaatgtatgttaaaattcaagaagaatacataagaatagctaacaaattctggaaagcaataacaagtggggaacttatgctaaccaggtatcagcatagataaatgtcaaaaaatgtagtgtttacccaaaaaaagcacattatagaattacattcacatttaacaccatttatataaagtatcaaacagcaaaatataatgccctattttttgtgaatatatatatggatgtggtaaaagaaatatgagactgataagcactaaactcaagaaaagagttacctcaggtgacagagaagaggaaagaaatcacagagaagtacattcaatcatacctacaacagttcatcaaaaaactaaaaatcaaagtgaaaagaaaacgtataacagtattggaatatgtcatttgtgtaaaagtaaaaagcacctgaagcaaatataaacagatgtatattcaaagggttcatttatcattctctgttcttttatatttgtgctatattttataacaaaattaattaggtaggcaaaaagaaaagaaggacaaaattgaggaggagttggataaattgatctttaagattcttttctgctctaagtcccacccttttctaaatgttctgatttaatgagagtcttaagtacctatacttctttcatttctaattaaatttaggtattaactttttagaacaagtcgtaacataaatcaggtaaagaataagaggcttgtgtgacacttaatttcacttgcaagaccaggcttctggccatttttctctgaagtaaacctaataacttcaacacattatataaataatagatttgtaagaaatgtttatcagtcatctttttaaatgtggtctcttcagtcttctcttgccctacatgctgcagaggggagagaaccctctccttcccctcgggaaattcaataattagagtctataaaataaactgacaattgattagcagaagaaaaggtgtacacacttataacatgcatatgcatgggggatcccacaaagtgtgagatgcagagaaacgccagatggttgaactacggtagggcaaggggaggaactgtactataaacaaagatcatcttattatgcagataaagtctctcaggtggcagccctcagaagtactggtgaaaagtctgtctgggtgtggtgtcctgggcatgaagacctgtcagcctcctcttctgtgatatgagtcatcttctctggttagtgtagaattcagggaagttattcatgacaatcacattctttctgaaggaacttcccttagtcagatgagagaacttcagagaaagctcctctctgtgcttcagaggggtgggagactagggagcagaatgtccaagagactgtagttttgaggctacaaagatgtagagaaattggaaccctcatatattgctggtgagattgcaaaatggtgtagccgctttggaaaacagtttgtttctcaacatactaaatacagagttatggttaggcatggtggctcacacctgtgatcacaacattctgggaggctgaggcaggagaatcacttgagctgaggagttcaagaccagtctaggcaacctagttagactccatctctacaaaaaattccttaaaaagctagctgggcgtggtggtgcacgcctgtagtcccagctaattgggaggctgaggtggggagatcacttgagcccaggagttcagggctgcagtgagctagaactgtgccactgcactccagcctgggcaagagaacaagaccctgtctcaaataatatgaataataaatatacataaataaatttttaaaaaacacagttatcatatgacccagtaattcttctcataggtttatacccaagagaactaaaaacatgtttctaaacaaaagtctatacacaaatgctcatagcaactttatacataatagctaaaaggtagaaacaacccaaatgtccatcagctgatgaatggatcaataaaatgtgatatacccattcaatgcaatattatccagcaataagaagaaatgaagtactgatatatgctatgactcagataagtctgtaaaatatatgaatggaaacatccagtcacaaaggccacatcttgtacgattctatttgtatgaaatgtctagaataggaaaatcaatagaagtagaaagcagattagtagttgtcagggacaaggaggggaaagatcgggagtgactgataatatgggatttcttttggaggtgatgaaaatgttctgacattaggcagtggtgacggttgtacaacttcgtgaatatactaaaaaccactgaactgtatatttttaaagagtgaaatttatggtacataaatatctccataaagccattcttaaaaaaatagaagatcaaaattatgaacttctttccttctatgacttccattttttccattataaatacaaaattttaaatgtgacctcacaacactaaaagggattatttttccaggttatgtatcatttctcctgatacgggaccattgttcagtccttcaaaatactagttttcttttgcaaatttctggtaggcatccgctatagtttggtttacttgacctcctccaaatctcatgttgaaggttggttaccggtgttgaaggtggggcctaatgggagatgtatgagccatggaggcagatccctcataagtggctgggtgagtcttcatattaatgagctcttgctctattggttctctaaagagctggttgttaaaaagagcctggtatctcccttctttcctctctctcccctcctcctcctctctcaccatgtggtctctgcacatatcagctcccctttgccttccaccatgaatagaagcttcctgaagccctcaccagaagcagaagccagcaccctgcttcttgtacagcttgtagaactgtgagccaagtaaagcttttttctttataacatacccagcctccggtattcccttctagcagcaaaaacagactaagacaacatctttatgtattccacaaatatgtattaaacaatagggagggtggcatcaacagttgtattgtcaagggagcaccaatagggaatattgtctttattcttgaagtgcttaaaatctaattggaaaaatcacttaatatttgtaggtctcaattccaccgtctgtaaactgattggtaacttctttagaatccggttcatcttaaaagttctatgattttatcagttctgcaaatctaagagttaaatttgttaaatttctctctacttacagccctaagatgtttaagtagagttttatcaaaaaactgcgccttggtcctaataataataacccataatcatattgacactggacatttttatgtgggcctactgtagcagttctattctaggtcaatagctacagtgattaaattgtctctgaagacctctaggcctttaaagtaatcaaaccacagagtgagaagatcaaggaaaataattaacttcttttattcaccactgattgtaaggtaccacttcctccaacagaggttaaataaccatctcgtggtctaacacaattatttcactgctgaaattccagcctctcctaaattaccatattttctgatataagacttaatccagatatttactaaaagagccgtcagatctttacctgaaaagttacctaaaaaataatatacatatatatgtatgcacatatacaaaatatttaacctcacaatttcaattcttcacatattttctttaggaggtccctggcttaaacttggttatcacaagaaaatagacaagaaggttatgaagacctagaagcacccgcctctcctcaccaatttgcagtaacttcaaattcaataatttgtttggctttcaagattttaatcatggtagcctgatgcagaggaaaacagaagtgactggattctagaaataaatgtagctttcaaagggcatttgtcaaaagggtttagaatataacatgagacgttagagagtaatggtatcaattcttactcaagtgacaaaatcacttctctaacaagcaatgttcagcataatttagtaggcactaaattatgatattattaccatgagcgagataattgttaaccactaacaaataatctttctactccatggtatccttttgccttttcttccacgaaagccttagtcttaaaaatagcaccaaataatattgtaagtttttcctcagtaatattcagtgctaaaaagatgatcagttctgacccacttcagatggcttcttaaaccaactacttatcaaaatcaaacaaattaattttactttctcaagactttatcttaaaaataaaaatttactaaacatcctaccatggtcacacactttagtttcctatggttactgtaacaaattaccaaaaacttggtggattaaaataacagaaatttattctctcacagttctggaggccagaagtccaaaacccttatcagcaggccaaaatcaatgtcttagcaaggccatgctccctccagaggctctagaggagaatccatttctcatctctctcagcttctggtagctgcctgcattccttagcttgtggacacatcactccaattttcaagatcagcatcttcaaatctctctctgcttcattttcacattgccttttagtatgtgtggtaaaaacttcctctaccttgctcttctcaggatgcatgtaattccatttagggcccatcctggtattctaggataatctctccatctcaagatccttaagttaattacatctgcaaagactctaagtctatgtaaggtaacatttacaagttccatggcttaggacctaatatctttaagggacttacttttcggccaccaccatccaccctctggccttaaagattcatatctgacccacatgccagatacatttgccccatcccagcatcccccaaagtcccaactcatcacagaatcaactcaggttcaaaatgtcatctaaataagcatcatctcaaactcccaaatcttacctaaattaggtttgagttagattatggggatgatctatcctgaggcacttctagatatttaccacacaaagccctacacacaaatttttatagcagcttcatctatattggaaagaatataaacaacctttaataatggatgaacaaactgtgatacatccatataaaggaatactactctgcaacaatacaagtaacagcatggagaaatcacaaatgtgctctactaagtaaaagaagccaaactcaaaaggctatctaccacatgattccatttctatggcattctggaaaaggaaaaatagagcgacagaaggcagataagtgatccttaggctccagggcaggggggaaaaactgaccacaaaagggctaacggaatttttaggggatgataaatatgttcaacatcttgaccatggtgttaggtccaacacatggctacacaactccatgtgtttgtcaaaacttgcagaactgtatagaaaaggagggaatttaactgtatgtaagtcaaaaataaatttaattaaaattgggaaaaaaaaatttacaatgtttcacacatttactgtagccagtgttccataaacccatgctgacctggtactaaaaaaaaaaaaaaaaaaattacaggcctcccacttctccggcaggggcagctgctgagccaggagtcactgggcatgtgggaccacctccctgatgtgatgcaagatgtgaacctggtgggccgcccactgacctgttgctacagtccctgaagtgagtccccaggttgggcctgccaggtcgggctggctgtgccctggccctggtgatggttggtccagctggggcagcagatattaatgtgccaggcagtgctggcaggtgaagccccgagtggaccctgtagatcggatggaccacgtggagtaccactacagcaaggccatgccactcatcttcatgagcagtatgctctgcagcggcaccatgctgatactcactgggctggatgcccaccttgaggtgcaccgcagcaaggagacgcacatcatcccttgtgtgctggccatgcaccaggcctggtccaagtctggccacaagaaactacagctggacaaggcgggcgtgactgacgaggtgctggacattgccatgcaggccttcatcctggaggtgatctctaagcaaagggagccagcccatgtgctctccaacaaggaccacttcagactcaagtccttgaatcactggtctacctgtcacacctgttctccagctccaagttcctgcttatggctcaggacagccatgtctccatgcactccttgatcacatgcaaggtcactattgcaaggtcactacmcaggcttcgacctcagcagctatggcaactgcctcaccaagtggaacaaggccatagaggtgatgtacacccagtgcatggaggtgggcaaggacaagtgcctgctcgtgtactacaaggaactggtgctgtagcctaggagcttcctcagactcatcccagaccatctcggcatcacctggagcaacactgtcctccaccatcaagacctcactggcaagtggaatggcatctccctgtctaagatccagtggtccatggatgaggtcatcaagcctgtgaacctggaagtgctctccaagtggactcaccacatccctggggacatggtgccagacatggcccagattgtcccatgctggctcagcttagccatgacccctatgcaaataccctccccaacccccacttccactatagcaaccctgacccccatcatcatcagtaacgcacaccaagtaagggactataaaacaccagtcaatctgaaaggatattttcaggtgaaccagaatagcacctcctcccacttaggaagctcatgatttccagatctctgcaaatggctttgttgcccaaaagagaagaaactgcatttaagtggaagttggaccccttatccaagcatattgcttgctattagtcgccaaaacaggatggctaatgaggaatatatttgcatatgtttgcaaaactgaatcattgaaaacataccttgaaactctatctttggataccctacggtggaaagcaatgattgtggaactcgtctggcttttgaaacttaggtattttatatttttcccctcgagaactattttttttttttttaagaaatggatttgccatcctccttaatttgcaggactccctttgtggctttgtttgctggaacaaggcccacagactgtgcttctcttacagatccttactttgaattttaagaatctacttaagaatttaatatataaggccttccctgattccccatcagttctagctagttttgaagagaaaaaaaaaatgatttgaataaaatgaacaggggcttaaataaacaaaaatttaaaaataaattatatatatcacataatatttaatacatgcaattttaacatacatatctaattttaatatatatttaaatatatcctgatgacaataacagagatgtacccaatacaaaatacataatctctaagaacatataaactattttttgtagagttcatcttgaataaatttacttactataatctgataaaaatgcttaaatgtgaaataaaaggtaacaaaataatccagtaattaaatattaaaattaagaaaatgacaacatttcaacaagagaacaaatttctgttgtttaagctacccaatctatggtattttgctatggcagcctgagcacactaaggcactggggatccttacgtaacaggccatactgagagttgatgattaattattcctccaatattcccagctagctaactaattcttcaagatccaggactgggccaggctctcccgagttcaactctgagtctctttcttgaaaagcaagttctaaaaacttccacagaaaacaagtttgtggctgcatcaggttagctacatatgttgggttttatgaagtaatctaattttactccaaggtgtcgaattttttcccctaaatttcaaatattttctggttttgcttatacagaaaatatcatgaatgaatctctcttatcagagaattcttcaatgtatgaaatcctgctagaatacataagacatcctactaactctatgcaatcataagtgaatgaacatctagaggttaaatttaattccgtgaccataatgctactagtctatgtctaataagcacagttactttccaaccttttcacagagtaaaaaagtttagaatactttttttttttttttgagacagggtctcgctctgtcgtccaggctggagtgcagtggcgcaatctcggctcactacaagctctgcctcccgggttcacaccattctcctgcctcagcctcccaagtagctgggactacaggtgcccgccaccacacccggctaatttttcttttgtatttttagtagagacggggtttcactgtgttagccaggatggtcttaatctcctaaccttgtgatccgcctgcctcagcctcccaaagtgctgggattacaggtgtgagccaccacacccagcctaatatactttttaaaaccatttaaatatttccttattctttttctgcacaaaaatatatgttctgcccccactaatctttcttaatttaataggtcacagaaacctcatataaaacccgcaaaaatgactggtcactttcactttgtaattcttataatttataaaaattgtaggtataactaccatctttactactttcttcccaaataaattctcagttatattaaaataatggtattaataatctcatactttttccctgtcttctgcttcttactcccatcccaacccccaattaccaagctgatacttttaagaatttaacaaggaaatgcaaaaacttgcataaaagtaccttcctgaatatgcagttcctttaaacaatctcagtagtactctcaggaggtcaagcaaactatttgaagcctcagtagatgacatgttttccttgctgtattagtttgaaaaaactatagattttcaatcttctctaaaaacaacatcatcatcatgatatggactataattattctacaaccacccactttaataataaatgctggcaatgttaaaacaacaaatggaatgccttacaatgcattaagctcttctcttaataaacacaaaattctaagtcttaccacaaccttttattcttgattcacaatcaaatccttttgtcagttattctcagcacttaatgttattcattccaataaatccaatcttagatggctacaaatgccttccctgtttctctatgtgtcttaagagaaaccagaggatgagcagagatggagctgtcattaagactatgcacaatacaattaggctttgttatatactaaattttgctagaatacctatttgtaacttttccccatttctgctgaactctaataaagagtaggtgctcaataaatacctactgtcatgatgatcatgataatgaagatggtaacactgggggaacacttattagctaccaggtactgtttcatttaattatcatcactataataatagtagtgttttcttaagaaactaagggagaaaagtgaagtatcttctccaaattgacacagtcaggatgtgaatataggcagtttggccttagactctaggttcttaatcactgcctccaaatcataaaacaaattactttcaagaaccagtatgtcaatgtttcacaagatgcttagttgcaaacaacttaatctactcaattgagttacaacaaaaaacaaaatttactaaaggttttagacagttcgtggaatttaccacaggaccagaaagtcgagttcagaggccttataaccaaaaacagcattccaaccacaccataggagtgctcccctcaaacgctacagcaacttccaggaccctgttcagggtactgagctgcctgccccatggcgtcaacaactggttacccccactgcaacacttgccaaaagaatggagcctgcacacaaagccattttcaccctaaaatccaccattcactactgaagttcaacttggcagatctgagttcatcattcgataaagttaacatgcaactactggctgtaaataaatataatttaaagtaaaaaatatataaagttatattgacagtatgtttaaaattacagtctcaagtaagaatatgctcaagatctaaaagagaaggcaaaattgtttaaaaaaaagtatggatttgggtttataggtgatttcttcatccttttttttctggttttaatgttatttacataagaaataaaaattcagcgggaaaaacatacatttcccttggcatatatacaacatcctaaaaatgtgactgagtttcactatgttcccaaaataacacaacccaatcaaaaaatacaaaattcacatcctgtgaaagcccccaaaagctgcaaaagccctaaaaaaatgcaaaattttatagaaccacagcttacattgcattagattatgttagattctccccaaatttgaatgtgtgccctgcacattggcagctccatacatttgtgtgtctcaatatttagaaatggctgaatttgatataagaagcttcaattttcttccccccatcaaaatggcctccccagaccagaggaagccagaaaggctgcctccccgatacaaacaccagcatgattcaagacaggacccacctggggaagtgctccctgccccttactagaaggccaggctctgcctggttcctgttagagctacttgacctcaccctggggtctgcccatgacttccagaccagccctaaccagaccagtgagtagcactggccaaatactctggcatccaaggataagtcccatttgctgttaccctggttcctcatgtttcctcaagtctataaccacaggcccctgaggtgaaatacagtctgcttcccagcttctctgtgtatgaagatcttgtctttagaaatctagctagaattacagttactcaagaatttgctcatgccaggaaccagtccccaaggatatcctgactgctgggccctgctccccatgacagaagtccacacagctgctgtacttctatgaacactgcctctctctactccacaatggcatgccaatgagacacctgcttgggtttccttcctaccacttctatgccagttaaagagcagagaagagcagatccaactgtccccacccctccctcaagcccgatgagaaaaactgggtcaccactagcttcactctacacgtgacagtaaaaatgccagaagacctattttgcatataaacttttaccattaaagaacatatattgaaatctagttttaagcataagcacaatgaaaaagatcaaaagcaggtgacaccatgatgaaagaaacaaacactttactttgaaaagtttttctcttcaagttttccacacataaaattctaaccacttataggtagtcatcatttcaatgaattgtgtcaaatgaaacagggaaaagaaagatacattcaccatgaggctaatttatgatctcactaaatccagcagactgaaggatttcatttagtctatcatgaattcttagaccaaagcaattctattaaaagcccttggaggaaaaaaaaaaaaactgaacttgttgtcaggtcaaacaacaaaagctttccctaaatattataattaagtcagatactgcccttcacacaattttgaatggctagcaccaaggaatttgcccatctaaaagggaggccaacaaaataaatttttttttgtttttacagaatgtttattctctgaaatccaatgcattcaaaggatgttaacacttaaaatgtttatcatttccaccaactgcattatcttagtaaaccaaaataagcacttttatcatagatgtagtcaatgattaatacatttttttaaaggacctaaacttcccccaaatttcagcacaggtagtttcattgtatgtttcacctagtaggtgatttttaaaaaatagtgtatagaaatgaatagtttcaaactgagtaaatatagtataccatgtcataaaacaaccaaatcaaaarcaactgccatgctaacaataagtcaaagaaatagtaattctggcttgtacagatacgtgcagtgttttcaaagctcttaacagttaatcgctaatacgtatctccaaagcttaacttagagttggaaggtgaatttcacagtaatgtaattttaaccactatttacattcactttaatatattaccaagatgcttacgctatgtcacaatggtgctttccagtattcacaatttacacgtaattgtacacacataatctaacatatgggacagttcttactattacaaattatcccttaaaagaaaaataaaacccaccttacatagaactctaaacatggtatgacttaaaacagataaacacaacatggcttttaatattttagccattttctaaataacagcatgtaaacttgtgtatttagtatatgagagctacaacttgattcactgagaaattatgcattaattttcttcaaccatctttctcatctttactaaaaaatctcatgacttgctggttctgtttcagtgaattccaaactgtattttttgggtgtgggggaagaagaggaggaaaggaaggtgataaatacactgtaaacagaaataagtccccccccaaaattaagcctttaaaaaaaaaataatattttacttctacactatttaacacttaagagtcagtcacaatgtttcatctttaacactgacagcaaataaattactgtaaggtcagtccgccttacc

SEQ ID NO: 93946 - DNA, 122452 bp, Homo sapiens
  misc_feature (1)...(122452): n = A,T,C or G
ttatgtccaaagatcctgtgagttgagtggctgtataagcgcagatgcacttggggaggaagcttaggaatcggagggtcctatgttaagtattaggctgatgccaaagtaactgaggcctttgccactacttttaaatggcaaaactcgcaattacttttgcaccaacctaataataacaggagttatttgtagaattgacggattttagaagggtaaaaggaaaaaggaaagctaagaaatgtgaaataaagaaaaaagcagacaacttagttacacgccaagtccttaactgagcgagaagagaaataaattctggaatctgtctattaataattcttcctcacccacaagataaaaacagtagcttccaatctgagacacactcatgcaacttcctctgtgacagagtgctctgaacactatgtgagtgggaccatagtgttctcagtattgcactttctacggtaaatttggctaagaaacacttttgttcttttcctgtaagtcaaaagaaagtcctcctaaactaactaaaatctaaaatttgtctgactctaggagattttttttctccagacaaattcaaattaaatgataacatctcttaaggatttctcaccagtatcagataaaaatacattgaatccaagctatttgaatggacaatactcasttgcacatacacaccatcaactgcagggggcgccaatgccttttccctcaggcccttcagaaaaggcggtgtagctggaattttaatttcttcctgtctgttaagtgtgattattgatgaagtactgcgctcatcccagtacccaaattgaagcttctcgaacatatacgaaatggaactgggccttacaacaaaggcaaatctagttcccatgtttaaaatagtctccggggtccctgaaaagtagagggtatattttaaaagaaaagaactgtgttttgtatcaaaacatagttttttgagtcataaccaattaggactctactccctgcaactccaaatacctcttctcatagaatatagtgaccagaggccatatcaagaaatgaggaacttaatatctagagaatttttatggttaataaataccacagtctcagcctcttttcttctggatgttagaaggaaaaggataattaaatgagagtttagatctcacataaaaagttaatatacaggttaaataaaaatataagtggatttattttatagaagttttcataatgggtcccaaatacttcattaagcatttctggataaaaatatgtaaagctctttataagcttttgttaataaattaaataccatttctctataaatatattttgcattaagctttcctgttagagttttcaggaaacatttcaaataaagtggccaggcatatcccatttgagatgaatgagatcattaggaaacacttatatctgaaataagcactgagatcattctgcatacaacctragggccctaattttttaaatatttcaaacaatgtgcctctttcaaatcattagatgtagagacatttaaggaactgattcaattagcccagaagaggggaatgctataatgtgtgatttatttttgaagataaattaaaatgcaagtgtatctgttaggaaaggtaggctgtcatcatggttagtaatgggaacaggaaagcaattaagcagggccacctgaggctgaaatagcccctaaacatagaaacttgacattcaagctggacattcggttactgtcaaaatcaagtgcatcttctttgagagggatctttgagctgcatttagttcccttcattgatttctaaagactagttctcaacttaacaaatactttcctccccttaactgcagctaacaagaaacctaaaytgttatggtttcataacttaaagtcaaacttcacataaagctgatgccttaaaattacagctttgcattctattatttaggtgaggaaatatgaggcaagaatttatttttctcctctgcaactccaggatattggctccaccaggcytaataaattgttttcataaggaaataaatacagcatgctgcagcttaggttcccttatgcaaggggtttcaaacaagatgtatcstaagcaataaataattacagaatggggggggtgggaggagaaacactgtaaaggtgggaaaaaaacagtttcttagccaaattggggggaaaaggctgaaattcaaattgttagaaatctgaaggtagttgactgtctttttatttttagagacagggtctcactccatcacccaggctggagtgcagtagcgtgatcatagctcaccataaccttgaactcctgcttcaagcgattctcctctttcagcctcctgagtagctagggctataggaatgcaccaccacgcctggatactttttttttttttttggtagaggcagggtcttgctatgttgtccagactggtcttgaactcctagcctcaagcaatcctcccaccttggcctaattacgggtgtaaaccaccgcatctggccaaagactgtcttcttaactattgtgaaatctgtagaggatatgagaaaacactaaaactagatgataaaagaaagagaagaggaaataagaatgtgagaagaggtgttaaggcagccttggaagtaatagccttgtaaatcttacaaactgaaaccaagaagatgaacaccaaagaagcatttataattcactgttcttttccgctacatcttgtccctaccttgatttaaaaagcttgaacaacagccgggcatggtggctcatgcctgtaatcccagcactttgggagtccgaggagggtggatcagttaaggtcaagagttcgagaccagtctggccaacatggtgaaactccatctccactaaaaatacaaaaattagctaggcatggtggtgrgtgcctgtaatcctagccattcaggaggcagaagcaggagaatcgcttgaacccaggaggcagaggttgcagtgagccgtgatcatgccattgcactccagccttggtgacagtctcaaaaaaacaaaaaagggggcttgaacaaaaagtggctgctgtcacgagctgaatatagacaaaatatatatcttttttggccagatacagtggctgacacctgtaatcccagcactttgggaggccgaggtgggtgaatcatgaggtcaggcattcgagatcagcctggctgacatagggaaatcctgtctctatccaaaacacaaaaaattagctgggtgtggtggcagatgcctgtaatcccagctactcgggaggctgaggcaggagaatcgctggaacctgggaggcggaggttgcagtgagccgagatcacaccattgcactccagcctggatgacagtgcgagactctgtctcaaaaaaaaaacacaaaaaaacaaaaaaacaccgatggggaaaagcaaaacgaagtttaagatcaagaggagaaaatgttctttaatcaggcagtgaaggaagttactttcacttacggtggaagttgtcaaaagtgctctgtcttttgctcaaatcaaccaacaaaaattcttattaaatagttattatgtgttctacgctgttttaggaactgaggaaggcacaagggagacaggctggagtgcaagatctcctctcactacaacctccacctcctgggttcaagcgattctcctgccttagcctcccgagtagttagaattacacgcacctgccaccaggcccagctaatttttgtatttttagtagagatggggtttcaccatgttggttaggctggtcttgaactcctgacctcaagtgatccacccgcctcggcctcccaaactgctgggattacaggcatgagccaccgtgcccagcctctataccttttctatagtgttctttttgctcttgttgaagcctcccttctcccttaagacccagccaaaggtcagctttcccagggagtaggcgtcctccttggagcactcagctcatgttgttatggctctttttcatgttttccccacagcctctcataactagtgataagtttttccacaggtatcactgttcccccttgctggaaccctctctttctccccaatgaactctaagattttacttttttatttctcaattgtatctctaaccttctaaggctttgataaaagtatatcttatgagcatacactgttattaagtcataatttttggccatagaaattccctgagtacagatccctcgactgcccaagctaaggtctgtagtttctccatgaaaacgattcacccaggtcactttgggttctgagaggctggaacttatttctataaacctaatactaaaatgaaatatttttgtctgttttcactattgcttagcatctgagcgctgagcattaggcagttttagttactcaaagtatctaaggaaagatgttttctggctgatgcttaatgttttcttaacgcccaagaaatgggactccagcggctctaaaaatggcatttaagatgagaatcaggccgggtgcagtggctcatgcctataatcctagcactttgggaggctgaggtggtagggtcacttgagcccagttcaagatcacagtgagctgtcacggtgccactgcattccagcctgagtgaaggagtgagaccctgtctcttcaaacaaaacaaaaagacgagaatcacagtgttgcttggtagtgtagaaaaagcgtttatcaacactgtaggcccctgtcaagcttacatttggagtgaggagtaaggaagggaagggacttatgcaggtctttccatgcggccttgatttagtccacggagtccaaagcccattctgaggcagggtctctaggttcttggtttacacctgcaggccgatccacagactagagggcagcttgttagactttggaaacacttagattaggggggagatggaaactcaatcccaaagggacagtaaaatgagcctaaggtctggcgggacgatagctcttagcgtgtaaggaacaacagaaaaacaaaatagtgtttctgtgggtgtgctgggtgaggaggggaaacagccggaagaggggatccgagaagaactaaaggagcccacgaagcatgcagctcctcggaggagccggggatgatcactgcccatatcctcccgccacagcgcaagccgcccgggcggtcccggccggcagagggcagcaactgggcgggcgacgcctggcaagggccgccccgcgctgacccgctcgcagggatcctcattctgagcgcgaggcgagggggactcgcacccactgccacctctccctgaccctctggccaccatgcacctcggcccggctgaggggagtcggggggtcgggggagagggcgtagctgccgagagcctggcgcccctgcccggaggaggagaacggaggacgccctcccgggtctccggaaaggaagggggacggggttcggtgggtcctgggacggggatgggagggaacgtgggcgagctgggagccgccctccgcagcctggactttcctggcctttctctactccgaagcagcaccgggccgctccggtccccgccagcccctgccagctccgcttccgggggccacgaccctcgctcgacttcggccgctgtgcgcctcccgccgactctgacccagggacccggagaccaagtccggctggccgaggcccgcgggccgcggcgcaagttccgctcccaccgtcgaggactgtggaggcggcgtgggctggtctccgcggccggggggcgggagcgccgggcggacttgaccgtgggcgccaagcgtcccggccgcgcggcgcgggctttatgtaaatggaggctgcgccgggcgtcctaggtaggatggaccagccccccgcgcctcggccctcacgtccaataagaagagccccagcttgacacctgcctatatacaggcgagcgcgcccccgggccgcggaccgcgcgcacagcccgcactgccccacgccgcgggctagggacacccggcccgccaccatgacttccagcaagatagagatgcccggcgaggtgaaggccgaccccgccgccctcatggcgtcgctgcacctcctgccgtcgcccacgcccaatctcgaaattaagtacaccaaggtaagcggccgcccagcgcccgtcgtccacggagactttctagaaccttcttcggtttccccgatctcttcagcgggtgagggctgcgggacggggccggggtcgtcggggccagcctgtcatcccggcgcagcagagggaccccctgcctgtcttcgggactggggcgtttgaagccccgccgtggtctgaggacgccytggggacttaacccaacccgaagcgcagcgttgaggggcagccgtcaacggctcctgccccggactctgaggctggtttctgtccgattctcccggtcccgactgccgcggggaaggcgtcggaaccgcttagtatcctcagatggaggccggggttccccgtcagcttggccacgcagcctggccgtcgcctctcggtcctccgccttccgggcccctcggctgttggtcccaatcaggtcctccacagcccggagggtgctgaggggctttcccgtaaggaattgtcaagacaccagygctctggccggtttgacaaatttcacggaaacctgactgataagtacagtaactccaacgtcagcgtttcatgtgaattttgtaggcagcggcagtttccctgggaaacttaaaaagttttaatatttgttagcatgttcggttttgaactgaagaacttacttttttttttttataacgaacgttgacatcttgggtttgctaagcaggatttttgttgttgcatcgcctaaaaaagaatatgcgtctgctacctaatataaaatgaatttactttccacaaattcgacatagaaaaaaaatgatcgattacaaacgtaggggtattgtaatgttacaacattttgagggaggtggtgagagagagatgggattsaaaaccacgtttcttggagttcattttgtagttctctggtttgattttctagtcctttcggtacatttctacactcaacttctcccaattaacgcaaacgcatagacgcacatgcatatggttaaaggttgattaaagatgtattccatcgtgcttttttacaagataaattttgtagagaagtaaattgtttgcatctggcttagtggttgaatgagatatacaagaaacaacatcagaatattgagattttacttgcattgagttttaggttacaaatcagggcgatttgtgttttgaatgtcgatttagatggatttaatgtacctgctagcttttttagatggtgtgacaaatttttcaaagccgttttaatgagaggtcgttaatggttataaccttttaggcattgtttgcataacaatagtgccaatgtgtggcacttgtctgggtttaggaacgagcagggaaagcatgcagcttagaagttttrttttatgagggtctctaacctcttcaggctctttttaaaggtcttaaaatggaagatctacacaggagaaaagacctaaccctcagatttgggaaggtttgattttagtcttatttttgatgggatttttctaacagcctctgaaagaaattttaggtatgcaataggtacgtttttcagaatttaatttggaagctcttccagttctcttactccctaactaccccctctctcttttctctcttgttctcccccagtaggaaagacaactgatttatagctaattggagcctttaatgtggagtcttttagctcggggaacttttatccagtatccactttcccacttaatacaaagaaaaacaatcagaaatgaaataatggattgtaacttgattctttaatttgtggggaggaggtaccttatttttgccttgacaaacaaccctcataaacactgagtaacactaatctaaaggcgagctctttccacaaaaacttgtaaaatcaggtatctgtgagcattcccagcagttttcctcctcagctctttagtgagacttctaaattttctaagacaagcatagtggacaagcagtattttttttttaaacgtgaagagcagaagctgctcttttggtatcccagggtaatgatttttttacttaaaggaaaaataagattaatagtgagttttttaaaaacaaacatgaccagaagtgagggaaattatattagcaatttcaaacagaagagtgaacaagatagaatggacagtcctttagcatagtgataccatattcgataggggattttaaaagggtaatggctacaaaagtattacgcgttagggcgtgttaaatatcacatttgaaagaaacacaatatttgcatcagaaaatgatactgtaagacaatatgttaytgttttttgtcttgctaaacatacatctttagtgaaggatatgactttctgtatgatttttcagtgtgatattgggacccacatagagtcaytacttaaaataaatgaccagactatgagaatttcaagtaatgtgcacttagaaaactttgtacttgtgatcttgtatttttctgtatttttgctccaacttcctcctcctcctagaagtatttcacatttttaataaagggaatgggggagatgaccagaattaaaagttactgcctttgcctgctagaggtycagtggaaatgctccagaattaaagttcattccctaaggatgttgaaagggctaaactcatggttgtgtatggacttttaggcagttacattccattttttaaaatacgcttaccactctgaaattctagtatccatattataccaatgatcaatggcaataccatttttggaacatgtctatttgtatttccctaatacagcaagctggatcccaagttttaaaagtgatcccttatgaaggaatgtgctttttaaaactagatggtgttagtcaaggaggagtgaaaactaacatgaagtattgaggggaccaatttggtaccaagagaatgcgctctcctttgcttgtatcctaagaagactgcattctgattgccttgagcgatgtgtttatgaatttaaaattttctgagttgtctattttattagtctgacttttataattttgtatarctgatattataggaatacacacattacaaagtcaaggctcagcactttactgaccgcccctgactgcaggggatatctcttaacagattcccaggtctttggaaacttgtcctctgtattccacttcgaccttctttcttggctctatcttctcttctggctgtaccggtctctcctttccttcctccctcccccagatcgttgtgctgtctttctcttggtcactttttcagtgagagtttatgcccataactaacagtaacaaagagttatgttttttttttctgcatctgatattatatggggctgaaacacagggaggaagagggtatttataacataatgacctgctaaaatagaagaggcaaaaaggcaatcaacttaaaactcagagctaatgtgcatcgtgagtctagatttgtctttttatttattcatytaaacttctgttttctggggtctatttcaattaaattcaaaaggcatttgagtggccatgttcctaacaggggtgcttttcactgtgttagactggaaacatctgycttctgggagattagggtcttattaaaaagtttgtgtgccaaaaattggttgttagtacagcagtagttcagttgatcaatgtaataataatgatgatgataattataatgccacttacatttttatagggcctaatggtctgcctagcactttcatatatatcttgtttgatccttgcaaaaccttttgaaggagagagagtagaaataaatagaataattcataagaaagacattggccttgactttaaagaaattgatagttttcatcaccatacactttttctaacggtctgtggcacgttgttttttcatcgttttgttccgttttttttttttktttkttttttttttttttgagggaaggagtttaaatctttatattttgtgttgcttctctcgcaaccatggagaaaatatgaactagtctacccctcttaagaaggagctatcttttgtgacttttgattctaatactttaaatggctatttttgatttttctatgagatttttttttttaatctggggcaagattcttgcctgtgccaggaataatttcttaaaagataggtgtggatctagatccttccaaacctttacttaasattgtctgttttggtcataaattgtcagtcaaactacatgttaatagaggacttcaggttttttttttaaatactttttcataactatgcagctttttggtgtttgtatcatctccatttaacacagggaagctggacaatttcatcacaggacttgaattagataattctcctggggtcctgccctgatcccttccactacatgggcctrtgttaccatgtggaattatcatttgctgagggactcctcgttctttatttctataaaatgatgaatgatagtttttgtatttcagagtagaggattctctgaggagactgttttgtgaggtctgacttcytcatagccaggcttaagaaaggcaaatcatgcatagttagttctctgttgcatcaatgaagcacaatgatttaaccatgacaaaatcagtaaatatcccaagtcccatcacccagagttatcagttctgagtctttcttagttggacaataaaatacaaatactgatwggagtttttgtctcttgagttatcttagtgacagtatcaggggtcagcaaactgtggactgtctgcctggttttataaataaagttttattgtaacacaactgcactcattcarttatatactgtctgcggcagctttctgactataatggcagagccacagaaaccatatagcccmcattttagaaaaaacttgcatgcccttccttcatttggaaaaagagagactytgagttaaaataagcctttgatcaaatcctggtcagaaaggtacttatcagctacatggmcagttacatttatttgacacatagtgcctgatatgatgccaggtcctagggatgcaacagcacaaaaaaaaaaaaaaaaaaaaaaagatatgtgtggcatcttaaagagtttcttcactgactttcaatttctacatttgtcatcattgagataatagtatctactttatggggttaaaaggactaaatgaaaagtgtgttaaagtaagtggcatataatgatagccaaaattctattgcatttttgcaaagtgatgactatatatatatttagagatctaaattaatggaaaccaattttaaggaagatcagaattatgtgatcaactggccaggcgcagtggctcacacctgtaatcccagcactttgggaggctgaggcgggtggatcacctgaagccaggagtttgacaccaacctggccaatcatggtgaaaccccatctctactaaaaataygaaattagctgtgtggtggtacacgcctgtaatcccagcttcttggaaggctgaggcaggagaatcacttgaacccaggaggcagaggttgcaataagctcagatcataccattgcactccagcctgggcgacaagagtgaaacttcatctcaaaaaaattatatgatcaacaaagttttataaaaccggtctgttttatgtattcttttaattatttttattacatttattatgtgcattactcataagagttcaatattctgggtagctatggaatcctccttatatatttacactgcgtttttaccaaatgggattcctgggagggttttccaccaaggtcttgtctttactaaaaaagttactaaagcattttctctgacagtattttaataataaaattagatatcttgacatttgtgccaaaatatagcatgaatatgcttcaatatgcccgattagctgagcctaaactccaggttgcaaatagaygtttctggtattttaagtagttaggataaaaatacaagatattgatacataaatgtgggaagtatgcagcatacaaggacattctcagaaggtagataccttttgacagtgggaaggtatcttactttatataatttaaaaacgaagaaacttttactagtcctgactgtccaagataacatatggaattttgagagcattttccaggagcagtcaccttccagaaagtaaaagcaccaggccgtggctattttgaaagccctcctagcakttctttaatttctttattgactgtgacaggtaatttcaaagccattcatttccccccaaacagcaaatctaattcacgtagaggtgattgctgtaatgtcacctgggttaatttttaattgcctttaattgtatctttgagatctatttcatttaaccttttaaatatatgagattatgcacattgggaattacttatcactggtatttctctactgtctgcctttaagattgagttatgtttaaattgttttccttcaaaatcttagagcttatttacagcaggtttatttacaacaagtctctgttggatcacatgatgaaaacacttccaggctttgaaaattccagttggaataataattgggtgatttcaccacctasacttctgctgggctctaaacaacacttccctggggctaaacgtggggattaattgacctctgtagaatgtggttaaaaattagtatgtctgcgtgtgaactttctaatttttattatagaaggaagcctttcttttactccagttcagctctgttacctccagaagtagttacctgctctgtttcccttcctcatcactgtctgacctttggagagccaaagtagtatttctttatcactacaactstggaaagagaaaagcttttgtttaggtcaaactggaaacacctgtttcttatctagaagaatttagcatatcatgaatctgaaaactctttccaatcttgattatacatttttcaaaatattaaaaagttatattttaatatattttattttacattattttcatccatctattcattggactttgaatttcaagtccagtgactcttaggttttttttttttttttkaatatcatttctagtgattccttaaagattaaacagtcagaaagtggtataggttgtgtgactctttcccacaagaagaatggaattacctcccagtaaatgaatctggcgaaatattgtgagtttaggaaacccactaattatttagcaagcccacgagatatgcaaaaataacctacttccccttttccccacctgtcactcctaacactcatataccagatttccagactgagatgtgtgtgatagtggcacgatttcaggtgggaaggaggaggggaaggctttgcctgggaaggtgaaattatgaaatgcctgtatgaatttatggagaacaactgaaagtcttatttctctaggtgtgaaaattggacttgctggcagaatcctttttgggagaagatgaagaatcagtgtgagactgtttggttaaaatccccaataaaactgaaactggtgaattctgcctcatctatgttttacagtttgataatataattgtattatttaattttattataaaatttaattttaatttttattatctcagggtcatttttatttttggctgtagccagagctactcttgtgcctccctgaatttatgtattcatttgtgtatttaacatttattaaggccttttgtgtataaagcattgtgagtcactctggcagagaaagatatataggtgtggcccctgctctgaagaggcggtagaggattcccatttgggtgtggagtggggtcatgcacacagtagctattgttcatgatagaagatgctaaatgtttgagatgaatgaggattcagaagatagagatgtttccagctcagcagaagaacagcacactattgccagacatatttgacagaaaatgaattgctttaatcatacagaaaagtaaagcagtaatataacaaatgtgtgtacctgtacctagatttgttagttcttaatgttttgcagtatttgcttctaattttttaaaaggaataaattgaagcccccatttctttctttctcttcctttgccagaggcatttatcttcactataggtatatgtatccataaataatacatgctattgttttgcrtggtaacatcttttatataaatgttttatatatatgtaccatatatatatatatatccttctgtaatttgattagcttgttaaacatatgttcagtattcatccatgttgttggatgtacttataattagttcattgtaattgttgcagagtattccattctttgaatatatcctaatttttagtttctgctcttgacatttatgatgcatccagcattttgttattgcagtaatgctgcattggacattcctgatcatgtctcctcatatacctggtgagagagcatctaggatgtatacctaaaagtgatattgctggctcatggagtatatgtatctacaacttaattagggattgccaaatttctgtccaacatagttatactagtttccaccaccagtatattcccagtatgtacacctccagtatatcccaccagcagtgtgtcagagttcccattagtctacattttcacctatacttcagattctcatacttattaaattttgctaacctggtaagtgtgaaatggcatctcattgctactttgatttgtgtttccttgatttcttgtgagattgagcatcgtttcatgttggccgtttggttttcctcctttggctaatttatcatttgctcatttttctatgttgtgtatttactgatttgttatcagtttttataaatgtattcaggattataatttttatcagttatttactatgcaaacattttctttcctcttgtaactttccctcttctttttcttgtgtaactgtcatacagttttaaatgcaaaggaagaaggatttttcctttagagtcctgtttcagaaatgcattcctattgcagatttttcaaggcattctttttgtagtcttcagaaagtttatttttgctttttgcatttctgtctttacctcctagaaytggtcattgcttatgcatggggacaataataaagacaaatgatgtagcattggaaagtcaaacaatattgatgtttaaataatttttaaaaattgtattccttgaagtcttggaatcagattaggaagtctagaatgtgtggtcttctctataatgggaaaataggagaaactactttgattgatggttttaatacacactagtttccctaaactaagaacagtgctgtgttccacaaacttacctctaggcggccactgtataaaactctagggtaacatgattattataacttattcatgtcaagacttaatttccctacctttcttacattatctggaacagaataagtacttaaatattagctgtggttgtactcttgctcatgtgcgctcgcgctgtgtctctcacacacatacaacactcatttttgaagggtcaagataaattgatgaattatttactctgtgctgctgatagatttggagaaaacatggataggtagcaaataatttaaaaagaatttctaaaagrccttttttttgaataactctacattattcaagaataatatacttcatcctgttagtgaagagaatttaaattattcctaagcaccaggtctgaaaataacattacttcttattttgttaacattttaacttaagttctaaacccaaagctgktgtatatatttacctttgtgtttgaatttcatcagtgatttggttcatacatgtgtatctctaattttaaagaaaatattgtggaagtgtgaaattctccaaccttaaaactaaaactaccccttctgtgtatatacttacatataacacctgacaattttggctacacacttattttttgataatgaatgtatattctctgagcattcatattacttatttgcacttctcagtggtacaatttttgcatggtattatatttttctgtgtaactccctacttctaaactgtactagattataaactcttatttatcatggtgtttctgaagtacctagctcaatgtctaacaatgtagaaacttcaagaatgttttcttaatgaatacttgttatattttaatagctacggcttttattattaatactacaatattcagagtacttttcacatatgattacattaaattcttggggcaacactacgatgtggatattgtattaatatcttcattttataagtgagaaaatcaagcatattaaagttagttttttcaggctcaacagcaatagtgggtggcaattccaggactcaatactcctccttccctactcgtaacaataaggacaaacataataaccactacaaagacaatacaatttggactattaacctaaagccttgctgartgtttcataggaaaccccaagcccagttcctcaactacaaatcccatatttcattcagatcctaagtctaattccactcagtattgtccgcagctatcataagcaacaattccaaccagacaaaaatgggagtatgaatttaaaaaaaggagagaattgatacaatttgacactttaggtatacatcacctgggaatatgtgattttttaggttatgataaagaacgatgtttttcaatcctcattggttgtgtagtcacacactgcccttaataacacctgtttatttgatctgttttgtttgcattcaaaaagtgttttctttttttatggctgttaagattgacttgggagggaggatgtgtgaggctattgaggataatatattttacattctttctaatgctttctgtgccccagtgggccatcattttgtgtaactgggctataatttctgtgagagagatgcttgccagaaagagttgggtgggtatgttccatcttgtctcttatgagcaatcatcttactaaggcttaattactatcagatccctctgttacctgtaatctcagtggggaggcagaatagaggaattcatgcagtactcaaactttgagtttcagcaacacaaaggggtggcatttggggtgcacaattaatgtttcattataaatgattgaaaaatcctctctaaagaaactgctgaaaggttgtgtcctttaagccagatcttgcaatctccagatttctctgacttcacttttagagagaacagatcttttttacttaccaaacttatgccttttctttccttttttattcctccccttttgtgcttctcttctgcttcccttggtgtttctcttaggacaggcacttgataactcttatttctcgtttagactcatttacctgtttgcatgaaatggttagttatgcctgggaacctttgtagttggctctcccagctgttggcctaaatggtcctttgggagaccagaagcaatgaacctggaataaccacatttgacttctgggagccctcctgagaatttagtaattacttaatggattgaattggcgacatatactattccagataacagcctgggttgcattaaattaaccttcacaaatgggtatttattggtgtactcttaaaagactacacgtgttggctgtaattgctcttccatgtttctccatgctgataggtatttgtactgagtgaaaaatttctgagattaaagcctgggtggtagttgtagctatttagtgatgtgtgtcattgtgttcagcacattgagcataaatcctgtcttgtaaacagcagggagactaatgaggtttgcccacattctggtatcattaccaggaattccaacagagaaaaagagagggcgtagaaaagaagtacacaaaacagtgatttttggaactcctgatgatctgatttaaggagaaagatgattgctcagcatttagtataggcatgtatgcataaataggggtacataaagtacacttagccaaaaaacaaaccaaacattttgctttcactgaatgcttgcaaagtcactaacttattgctacggagatgagggccttatttgtgagtgtctgtaattgtgagtggtgtaaaggggacaactgttgaaataatgcagctgttaaaatgatagcatgctttttgcttttttggaacactttataatttcagtgaactaaaattccacaccaattttagttttacaatttttggagtatttctgctgtcattttcagtgataggcacacatgacttcagaacacaaaaatctcttagaagaagcattttaaatgtggcattttaggtttatttcgaactttattattactgttaagtactgtgtgttttataatgtcactccaagggatccaattactgtttaatttgtagactcatttttttcttggacttaaatttttatgagagccggtatcatggctgccttgacacagagtgtggtccatacatcttcgtgtttgatgaatgaataaatgaatacatcctagacaataaattgtctgatttcatttgcagagtcattaatagttaaaatgccaggactagaaagtgaattccaaggtaaagtgttttgaaacaaatttctttcatgtgcttcctttaaagaaggtatacacacatccactttggaaaactcttctgcttcattgccacgcatttaccccttcctctgaaatagaaacctttcagwgtaccttgcagagcagtgaacaaggcactggacagggcattagaagacccgtgttctgaccccagctctgtcacttatgtatgttcatttaacagtttcttggatatgcaggcattgaataaatacttattgaattagcgaatgaacaaaataacttgatcatttattatctattctataatgggacctggaaatatgaaaatgctttgtgatactgggtacgccacttaaatttcctggtaacaggaagcagaggttgcactgagccgagattgcgccactgcactgcagcctgggcgacagagcaagactccctctcaaaaaataaaaaaaataaaaaataaatcctggtaacagctttgttacttacaaaatgagagaccagaatgagatgcttattaattaatccacctactttttaaaagtgttggattagaaaagctataagatttctttaccccaccctgactaattagaactctactttcctgggcccagaacttgggattatgggcatctgaaagacaatactgaactgcttgcatatttagttgtggtctttttagggccgaaaatttgcactcaaacagttttgttgaaaatactgtctcaacaatgtactcatggttaccaaagagtagtccacagaaatccctgttaatgattctcgttatataaatgagtggctagcagtgtcataaagatccagcrgaaatcaaaatgtttcatatttgctaaggacttaccatattagaaattagagcagtgactcccaagagacttcctcctttgagtcttggtgaaaattgattttaatactttgtaatagtagtaggcagaaaatatttgttgtcatttctcctccagaccatttgagcagctttcctgccaagctaagctcatgaaaaccatggagggtgaggaagcgtggtggcaagggaacttgtcagaagcttacagcttttcacttgagtctaatagagacttagcactttgcaggtcagtgccactgctatttgtctctgacctaagagatctggagttcttcacatcaaaaccacatcttgctgagcagagatcaaacgtaggaaggtaagaattctgccagtgatttatcatgccagggagagtgatcaggccatatggggccactgcaaatgaagttgacattctggcagtttctcatataggcctctcatgtagttatggctagtttttcttgtagaggaattccgggtcaagtggcagctttcagtggtatttcttagcagaactgacctccaacatgaggtttatttcaaaatgtagtcctagcaagagttttctaatgttgtgtttaaatggcaaatagggatcttgaccaaatttgagcttttcatttgtctcctttcctctttttttcttttctgggaagttgcctatctaaaaaaataaataaataaaaagagaaaattaagtttaagatgtacaaaaatttctcaaaatgttagatgtgattttaaaatgaactctataaattatgcacaattaggcttattagtttatcatcacagtttaagtcagggtcctttaggaatgacttactgcaaataatattataatccagttcctggggtaagaggaagcatcacatttaaggaataatttaattctttaaatacgattatttgctaagatctgagtcaagtgcaaaccttttcatttgacagaaaaaaattcaataattcttctttaactacttatatcaacagatatgtaaaaatgattgtgctacataaaattcagcattttgtttaccgtcacaagcaaatgtttagtctcctgtggagaaatcactcatttattggttcaaagscttcttcarccttaggatatgcattgaggtgttcgagcccttccttgcatagatgtttgctttgcagcataaatgaaagatgatattcacatttaaacatagtggtttgagacattaacttctarttcaactgaagatgctagttgctacttttggttttactttttttgtgatgagaaaaatttccttagttgaaataggctttagtgactagaactaggtcttaacctgtgtatcaaattcacttgatttgttgaattatcactttatctgtttataaactggaaattaatattccggttgatgaagtactttgcctgtgcagggagcaagtctaagtgcaataatgaaatggaatttgtcttagttttcacttaccattcttggaacacatacaacatccatgaaaacatggtgggattgtcagataaaataaatgatttttagtgaaatttgaagattaagtaaataatgaattagttttttagtatcagtataccctatgatttcccatacttaaactgaaattttatttactgtttttctgaaattcatatttaattatacttttatttgctaaaacgggcagctctaaactgttagagaaatcattggtgatttttatctgtgaccagttaataaacatcattttaatgtaaaattaactggcattaaaagcaaaaaccaaggaattctttaaaactggtacactggaataatgaagagcacagtagaaagactttttttttttaaccctagcaatactattgaataaatagggcaactaagcccattgtaaaaacagcttaatctcctaaatgaattgctccaaccttctaattcaaaatcatacaaacaaaaacattgagataagctgggtgctttttcaaatggggacccccgtggctttgaaaataaacacttcagcccccttccccctcaagacccacactcacacccactagcctttctgaagtcttccatttgcaaatgaacaggctgaattctgagaaagacagaagactaattgaacctagggaagataggcagaggaacatttgtttccaaacagaagacaaaaagaaatcatgttacattctcagttttcaagacaggggggtacataaaagccatttctcttgagttttcttctctcaaagtacatttcccacaccgctgttcagaccctctmcaggccaggtagccttaccatgtttgaaccagcctgcattagcctgtctctatggcagtgtcagaagtgggtagtgatcagacatttggggagaccagttaatgtgttggatggccttcaccatctttacctctttccccaccctatctgtctctgctggtttagcaaagtggtcttagtagcaacagagagtaagtgaacgaatactcagacagaacaaggagtgactagctttttaagagtactcataaattgccttgaattgattgcttatattcagaatcagaatgaataaaaagtctcagtgcatactatgttaggcttttcagtaatccaatatcttatttaatccttacaaccactcaataaatggtttttattatcttattgtacaaatgagaaaattgagccacagaaagtttaaatgacacatctaagtcacaccatctagcaatctttgtacacgtaggaatatgacccataaagaaatcatgcgagaggaatagaggcacaactggatcttaggacaccttcatcaaatttctgtggttaaagaagatttggtatattcctaacatggaatactcttcagcagtgaaaagaaccaaaccacaagatacattcaacaacatggataaattgtaaaatacgctgagtgaaagaacagaaaagggtacttactatgtgattccattcatatgaaattctagaaaaggcaaaataatctatagtgccagaaagcagatcagtggttgtttggaatgtgagggtcagggtgggtaagagggagggattacaaagggaaacaaggaaatttgtggggtgsggtggggaatggatatattcattatcttgactgtggggatgggtgtacatatgctaaaactcatcagatacatacagcttattattataccttaacagagtattaagattttaaacatttaaaaaatagagtccaagaagacctccatgagactcagctcaggtgttagtcatacctgtcatttgattaagggagactgggaaaattggacattttagatctgttgtgggagtatcctgctgtaacccatggaatcctgagtcaaatggaacactaggtctgcatcataggtcaccgtaattcccctggaccctttaatctgaatgacccaaaataacactgaatatctcaagcagcatcattctgggaaaggggcagatcccccatccatacttcccttctcaattcatttggatccggccttgtccatcaaaggctgaccaaactgtcctctggggaacacgactagtgaccttttgtctctgtagtctcatctgtgtcctttcactttcagaagcagaccttgaggttagatggatatgtgagaagctaggtggatcttggctacctaactgttaatgtcctaagttatttccatttacagcattaacacagtttgtgtaatcattgaacatcagtacaatgtgttgggcatacaacacttaatttaaaatacccagctgcttactctggcacaatcactttctattagtattttaaagctgttttaaaatgttacctttagttttacattttttttgaccttgtactgtctgaatacttgagcagtctagttagcagccttttctagtgaagacttttcctttttcctgactttcagcttaggactcagcataagtggggttcagggcctgcaatattgggtccattatttaaaactgttaattgatttaaaattataattgataaattagtccttctcaaagcaagctttctaaaaccatgctttttgctagtaaaatattacacttactgaacaaagcccatgtccctataatatcaaaacattgactttaaagtgaaaaatgcaatcartcatctaggtgttttttctatacaatgccatttgggtgtttttttcacttyttagccagatgttttggcgtgaagcaaagcgaatgaataatggaagtcaacagaaccactcttgttctaactatataaccatttcaggaagaagttttttccccctctctaaatgatctgagcacttgccttattgttttactctgtataggtagactcttaattagaagtaaaaaaagttggggctaatttttttcaaagttaaaaatattacctttgattataatgtttaaaggacaccagccttacagagtgccatactgagatgatcatcaatacagttttttataggtaaatgatagcgctgccatttttttggttgttcttaaatctctttaaagtagaaacagtgggacaatcatgtaaaaggagataactaccattaagtcctcaaactacttccttatattgtttaactaaactttttcatataaatcaatctggatattgatttgctgtctggtactctcttatgaggaatgaaaacagtttaatggcaagttgagtaaaatttaactctccaaggtacaatctactgcagagtttaatacaaatcatttgaagcatttactattaaaaaaacaaaacgttttattactgaaataaaacatggcagctttatgtcaaagattcactgaggataggaaattatttacacctaactcctatcaatacctgctgctttgagaattcctcaggctttagattccccaattagaaaatccatggcagcctgcctatatagttatggccattttgctgtgggctgacaagtgcgataagcctagtttgtcctctcttgttttcctgttgcaaaagtggccaagcaaggcaggctgtatggctagtaagtttcactgttttgaatctttatccagctaactgttgagatgtatacagcaacttaaagcaacttttagaagaatccgatgctgttgacagccaatcttaattccttatcccagccccactactttttctagaaacatgatttactatatcctttgagcacctactgcattwtaagtgctgttaagatgtgggggaaaccaaatgaagccagcagacctttcttcaagaacttagggaagagagaaactcccattttaaccagctatacttcaggcacatttcacattttatctcactaattgtgcaatagctctgtaaggcagacaggtcttatttctgtttttacggaggaggaaacaaagctcagagagtttaatagcttgctcaggatttacacaagtggcaaaaggcagactggcattaaaatggagatctttcaactctacctcccccattctaggttgttctatgaggaagatgaaggaatacatacaagattaatcacctcaatctttaaygaatttcttgatttttctttactttgttttacatacatagatatgacccttgtaacattcaaccatcaagcatgaataaattaagcaactctacacctgtcttgggggaacagacttgcttgttaccttgctatcctgatgctctcttttgaaaagtaaaattgtataaaccagcgtagtcacttttaattggctttcaaaaagccaaactttatgatctttactgttttaacacaggaatacaaccatctgcaccattcacatgtcaractaccttccttggagaccgtgagatatctattcctttgtggtttgggaagggacatttcttattggcagaaagcctttgttgcagggagtattgtccttattagagttcttaaaagcattctactaggaaggtgaaattgctgagataagaaaatatatgacatttcctgccatggtgcccagaatmtaagacgctttgaaatattgacaaaaggaaattgtacttaacagatttttttcaaatgcatgtgtggagtgtctctaataaagtaccattatgaatttttattttaattcccttaggtggaagaagaaattgtgggccaaayagcagtgaccatattcttttttaattatactttaagttctagggtacacgtgcagaacatgcatttttgttacataggtatacacgtaccatacttagccccccatcccctgacaggtccgggtgtgtggtgttccccatcctgtgtccacgtgttctcattgttcagttcctgcttatgagtgagaatatgcggtgtttggttttctgttcttgtgttagtttgctgagattgatggtttccagcttcatccatgtccctgcaaaggacatgaactcatccttttttatggctgcatagtattccatggtgtatatgtttcacattttctttatccagtctatcattgatggacatttgggttggttccaagtctttgctattgtgaatagtgccgcaataaacatacgtgtgcgtgtgtctttatagtagcatgatttataatcctttgggtatatacccagtaatgggatcactgggtgaaacggtatttctagttctagatccttgaggagtcgacacactgtctcccacagtggttgaactaatttacactccaaccaacagtgtaaaagtgctcctgtttctccacmtcctctccagcatctattgtttcctgactttttaatgattgccgttctaactggtgtgagatagtatctctctgtggctttgatttgcatttctctaatgaccaatgatgagcattttttcatatgtttgttggctgcataaatgtcttctttcgagaagtctctgttcatatgctttgcccactttttaatggggttgtttgtttttttcttgtagatttgttgaagttgtttgtagattctggatattagccctttgagcagtgaccattttataaagactttggcatttgatatgcttttctttttcagtctgggataccgagattctacagagaagggaacatatgaaaaaggactcactttgttgccatgaaattgtaaccagctcctaaatcagttagcttggccattcccttttccctctgctcatccaaaaccggccctcctctgggaagtaattatgataaggattggttttgaggtcctcttcctgaatcctcaaatttagtcctgttggttggaagagcacaaagctattccttaatatgcctaggaaaataattttctatttgaggattgtaatagtctggttgttgactgtcctctggcagaagtttctgcttctgcacctgggaagactgcagacagtgtcccaggacctcatctctaagtagtgtttcattaggaatataaatcaacagtttccctaacatattttgctttcgggaaagaaaatgaaaaattattttactggcacctgtgttgattgtgctgaagtaaaaggactcaaacagaattccttgtgctgaacagtgtctaagaagcatcatgatacaggaatagaaaaccacacactggatgttctcactcataaatgggagttgaacaatgagaacccgtggacacagggaggggaacatcacacactggggcatgtcggtgggtgggggcaggagagggagagcattaggacaaatacctaatgtgcacagggtttaaaacctagatgacaggttgataggtgcagcawaccaccatggcacatgtatacctaggtaacaaacgcacacattctatacatgtatcccagaacttaaataaaaaagaagcatcatgatagagatgcagcaaagatcrctcggatctggtcagccatcaagtcctcttttcaaatagacatcagcaaaaattaagtttagaaaaagcactgaggtgggaatcaggatatggggggttcrttctttattctgccacaaatccggggtatgtggccttggtcaagccattggacttcttttgacaagtttatttatctaacacttggatttgcagagattatatctaagaccctgtacagctctgtgaatctgtctcttcctaaccaaaggagcctctactatgtttagaccgagaaaaagattctcattcattagagcattttaaaatagtgctttartaggacttggctgttaaagtatgatcttggtgtactgaataatttcacaacaggaaacaaaaaccgttttttggcagggagggagggtttccagctgttcttggtgatgacttggcataggtttaaaaatgtytgttgtaggactcttttccacctgaatctcaccgtttcaaatgatgtctttgtagtatattcattgtgtgttaaaatattagacataattggaaaagaaggcagtcacatttgagaacacagagggcatactctgcagcagtcatggagattctgttattcaaatggctatgaaatgttaacatacactctttagagaaggaacaaatcaaacctatgttatcacagaacttctgatacactttcttattgagcgcccactggtggccacatgtgttctatatccactaacccagatgtacagaatattagaactcaagggttgtaagggatggcaatagatttaataacaaatgacatcttccattagattgatagtagctttctgaagtgccgtattgaaaagtattcagaaaagtctagctggaaagtgtcatgattcattattaatgtttgtcaagagcctggaaacaagatttgtatcataagtgccatggttagccttccttcagtcaccaggtctggtaccctcatagacaaagaaattgagggctagagaagctgagtgacttgccacatacttagcatgaaaccargactaaaacacaagcaacttcacctcttccttttcctcctcctcctgtgctgtagaagaaaataagacttttataagggtatccccttataaataagcccctaatgcacagtcagtttaaataacaaactataaaatgacatcattgatagtggccaggtgagaagactgcaattcaatttggcctttcagacttcaagtcactcaggagaactccagtgttatgatccagtgccccagagaaaagcagttccttgtgaaccaccttcatttgcaagggctttagcaggataccagtggcactggtattttagtaaatacgtccatagtcttggtgaccacagtgtctttatctagaatcatrttctggatgaaaactatttgtcttaacttcaattcagacaagaaaaatgtaggaagcctacaatataaatgagatggtattcactgtagattgagagacagcttttctgrgacatgagatgaaagtgattctaggatttcaagaaacttgactcctggaatccaaaacatacattgttttgcttttagctggaagaaacaatgtacgtttttaattcatacttgcttcttatgtaatatcaatacttaggaaacatttattgggcatctactattttactgttccttatgtagatgttggttatacaaaagtaaagatgacrtagtggcatagtatttgttcttaaggagcaagcaatacagtggagggtttaggtaaagtattacaggacagtatgataggtaggtatatgtcagaggacctgcagttagctctgtatgaagggatttaggaaggctttatcaagaggtcgtatatgaactcagttttgaaagatgactaagattttactgtcctgtcaattaaagaaggcaggaaacagtatgttcaaatatcctgactcayaaaagttcatgtcatgtttagaaattggtagttttaatataggatttgagagggggttgggacttctacagtctgaatgtttgtgtctcgccaaaaatcawatgttcaaatcctaatacagtagtccctccaccccattcatggttttgctttccacagtcaggtgagtacagtatggtaagatattttgagagacatcacgtttacataacttactaygatatggtgttgsagttcacttcattactagttgttaatctcttactgttcctatttacaaactaaacttgatcctaggtatgtatgtataggaraaaaacatagtatgtattactataccagtagtttgttactgtctgcggtttcaggcatccactgggagtyttggaacatatcccccatggataaaggaggactcctatacaaaggtgatagtattaggagatgagaactttgggaattgattaggtcatgagggcagagccctcatgagtgrgattagtgtccttgtaaaagaggcctgagagagctagcttgtccattctaccatgtgaggaaatggcaagaatgcaccatctatgaaccaaaaagtgggccctcaccagacactgaatctgccagtgccttgatctagaaattcccggcttccaggactatgagaaataagtttctgttgtttgtaagccacaaagttgatggtattttgttatagaagcttgaatgaactaagcgagggagagacttagatccacagattttaagttatcatgctcctcattttatggcgcatgtaacacactggtctgtgcaaattctctggtttcccccacaggttttcactccaatctatatttagatatggacatattattgatggaaaacacagtgttattttttctctatatgttttatttacataaatggtggtgttgtataaatgttatgcaggcatagatacttggtgatgagtgtccagagatgagactggagagattgtttgggatcagattataaaggaatctaaccctttggaaagaaacacatttgattaatttattttgaaatggtacagatggccacttgaaggtcatgcggcatgaaggaagttgctccagggcaccaccctgtttcacatactagtatctaggactgaggttaaggtgctagactatttagattttgaaccctcctctactgtgttcctaactggggggaagttcattttagtttttgtgcctgactttcctaatctataaacaggacaaacatgactgcctacttcatatggtggatgtgaagattaaatgagttaatatgtgtaaaaagtgtctagagcctgtaaatagtaagcacgcaaatgttaacatttattattattctcttgctcaatttggttttcaattctgactttatagtaagtttcttatttatattatttctactacctttggcctaatagaatatagatctttaatttaaagttacatcttagcagaggagacggggaacagccatagatgttgagaggaaaggttcaagttttttgccctgtcaattatttgtggtgtgaacttggatttacatcataaactttagcttattcctttagacaggaaataatgcctacatcgtagatttgttatctagatgaaatgaaatggtgaaagttcacagtacatagtgggcccctcataacgttcgttgtatctgaattacttactgaatgtgtgttatccatgtactttgggttagaggaaattcygctccctagattatctgtctgcaggttgttttatgattcatsgtatagttggacctgagtaaacgtgttctattagcacagctcttgagaaagaatgtacttatcaaacaattctgcctcttcagctgtggattcagagagccagtgctttctttgatgaaggccacttcgtcagaatatgcagagaggtgttctgttggcttctgtcaggcaggtgtggttgctttggctggaattctttaagacacacaaattgcctctctgatattttatacaattagaatataaaatatattatctttggagcatattcatagtaggtattcaataagtgcttgtgaatgttgttcccaaattttattattagaaccgtgactgttgatttcccccaccacagtactgaacacttatttcaagggcagggggctgattatcatttacttttttatatcttccaatgcctagcacagtgcctaccatataataggtgactaagaaatgattgcaaataaaggaagaattaatgacttctagggagctaggacaaacatgccaacttcctctccttttgcatgtgactcccctccctttttgttctcttcttttctcttttcagctcctcccttcctcttaataatcaatgttgtgagtcacttaactagccctaactcacctttttagaagacaatatttctttcctctcttcacaaaaatgaaaggtgacatgtctctattataaagaaatggcctcagcaacttctggaaaaactctagtggttaatcagttactttttatttaaatatatatgcttaatgctgaattacattgtaaaactcccaagctgatttatggtctcagcctgccttaattaacatcgattccagggggatagtaaatgggaatggccttcacaattgaggttgaacaatgaactctctgggtgttgtccaatttgtaacatgatttacatggaagcaagcccttcctttcccggggttatccctttttcatctggtgtttaggacgggttatatataatccatagataggaacatttgctgtcaaatacttttgctgatttagagctaggccacagaatggtcactattaataaagaaggagaaaaaaaaaactaatctgagactttgcagggattccaggttcttgctatgtgtcatcgcttgtccagtctgtggcggttttatgaagtggccataatgaaagtcagattaaatgcacaggatatatacatttaatcaacagccattggagtctgtggtgctggaagagttataagagccccatgaatgcaaacttattgcaaaagaattcaaggggtgggggaatgaatgtctgctgaatggtactacctgacacaggacaccaaaaaactttccagagtgaatgatttaagtgtaaggtttggcttgtaaagctgccagctgcttggtttcaaaacttgaaacgtttccaaaacattggatgaggcactttatatgtgcactagagtaaatactctggttttactgccaatttaaatgtgctcagtttacagtaatgagcttgtataggcattaccttgtttatagaaagtggaacaggaagaaatgaacattamccattaccagtagcaattcccattgccttctaccacaatattgatggcaagtttaatttcttccaatttgggactgtgtcacaactgacattggtgtgtatttggctttaatgtcatgttgcttcagcagaggaacacatgctgtgattcagcttgcctctgtcaaggctgatcagaccagttagttgtttcttactgtttttcctaaaacagatgtcaagagacagatatgggaattctgggacagtagaataggtaggtaccctgattacacgtaactgggtctgttttagccaagtctgttttctacaaatggatcactcatgggagccatttattttcccttaaaaattatttgggtgtgtttttatgctgtacatgaaagcagtggcctctgtctcttgggatgactggcacagaaatatccttatccctgggataaggctatttgactccttggatcatctcctagagataggaagatacttagactgaaagacataatttacttggcctggagaagaaagaaaatacagaaatttaaggagactccagcaaatacaatgcctagaatagagaagacactgagtaaatactgttgaaagagataagaaaggaagggaaggaagtagggagggaggggaagagggtgttagtaggaagagaccagggaaacccatagcttaagagacatatcccatgatttcagagatgtagatttcaagaggcaggaagatagagaaaaaaagaaggggaaggccccacgggggaaaactgagtttaacagatgttagcaaacttggacagagacacattaatctcaagggagatagattacgatgtgtgttactaaaaaaaacacaaagtgtrtctttttgagttcaactgatatcaaagtcctttttatacattgtctaggtggatcaaagactgctggttgccagggacctcttatctttatttctgctttaatttgcatggcttcttagaaccttttggcttaagtacacatatagggatgatgctacccaaggaattgcacacttccagacagtacaatttcttctgaattatgtgggatactagctaaatgcagaaattgaccaaaaccaaaagcataatctaggtctgcaaatagaattatgatgcacaagaatgtgaatatcacatttatttcttcatgtcatgggctgtccatgttttcaggctggtcttgctttaatggtttttctaacaatactttcatgatgaaaaaaaataaagctagttattcaacattgaatagtttaagtattgaatgcctaaattttgaagtttcatgggagatgagttccacttctttctcttagccctgtcagtatttattttccttggcttttaaaagtctcttcttcctgtttcctctacagtatttttcactccattttttaactgtscttcctaaatgtgtggttaatttataacataccttaaaaattctttctcttttctcataattctttttttctcttttctgaggtcttctttctatgactctgtctactacctatatgagttttctgatttatttactctcattctttgtgatttgggggccttgctgcttaaatacatattctacttactttgaggacagtgctgtggtagaggctgttgttaagaatccaaggggcaccttcatcatttgagcttttggtagaaggggagaaaagctaaatgtccatttctttcttctttgttacacttcttaaaycggggtatcagataatcttctgagaggagctaaagttaaagaagggctgatcaggccggctgaataattctactgaggatagagtttctttcttgtacttccccattccctactccaggtcatacttcctaattatttcttatttccccaaagtgttattctaacatgtcagccacacagatttctcttttctctgaagcaaactccttcactgcttatctatactatccatcttggcactaaatcacagtgtcttacgttatttaacttaccttagagtaatcttgtcattgaagcattattataagctccagagtacacgtcttctgtggattttcagtcgtacttacaatttcatgctcagaagaggcctttagtatatattttgcagtgtcttctgtgaagtcaaatttctgctcaggtattcttttccttcttagttccaactggtgctgttcatgttatatcaacctgtttgacgggaggatgtgggagggagttgcgcaggtcccttaatgttaaaaagtggttgcatttcaactaagagccataactcttctttagacatttctttagactattattttttaaatttatgtattttaaaaggttaatagttgctgccaaaagttgctgcccagtgtctttctgtcattatgcatctagatcttggataaatatgtgtatgaacatgaatatgtgtttgtgtgtatatgtgtgtgcataattaaattttatkttccagtgatttgttgatagtgtrttgattatatattgatcttgtatcctgggactttgtgctaaatttgtacttctagcaatttttgtagattttttaaggaatttctacatagacaataatgtcatctaaaaatatastattacttcttttattttaaaactttggcctcctatttatttcatattataatagcaaatgttattacactattaaatagaagtagtaagagctatccttgcatacattattttttaatgtattgattaattaaaagaacagtgatctggaaattgatagggagctaaaggaaaatgcaaaagctgggtttactctagaggtgaatgccaataccagttctgggactagtaaaataaatctatgtccagcatcagcaaaatgcacatttttctcaagctctcacaaagcattcagcaagatagaccacattctggggtataaatcacactttaacaagtttaaaaaagtagaaattatgcaaaaaagatattctcagattacagtggaattaaactaaaacagaaagatagctggaaaaaccaaaaatatttggaaattaaagaacacacttctgaataacacatgagttaaagagtaagtctcaagagaaattaagaaatattttgaactaaatgaaaatacaacttaaaaaatttgtgggatgctgctaaagcagtatttagatagaaatgtatcacactgaatgcatatatttaaaaataagaaatagtctaagcttttttaggaaactagaaaaagaagagtaatgtaaacagaaacaaaaaaataacaaaaattatagcacagatcgattaaattgaaaatgaaaacaataaagacaataaaactgtagactggttctttgaaaaaaattaataaaattgctaaacatgtagcctggctaactaaaagaaaaagagaagacacaaattactaatatcagaaatgaaagagggactattgctactactgccacggacagtagaagaataatacagaaatattatacacaactctttgcccacaaatttgataatttaggtgaaatgggccaattcattgaaagatgcattctaccaaaactcaaagagaaatatgtatgamtaggcctgtatctgttcaagaaattgaatcaataattaataacctttcaaaaaagaaagcactaagtccagatggtttcactggtgacttctaccaaacaaacataccaattatytacagtctcttccagaaagttgaagcagagggagcactaactcattttatgaggccatcgttaccctaatatcaaaaccagataaagagattacgagaatggaatactacaaactattacctctcatgaacatagatgcaaaaatccacaacaaaatattagcaaattgagtccaccaatgtataaaaagaattatacaccataaccaagcaggatttatttcaggcatacaaggctgatttggcattcaaaattcaattaatgtagtctgtcttatcaatgggctgacaaagaaaaaatcaggagatcatgtctgtacatgcagaaagagtatttgacaaaattcagcacccattcatcatataaagaaggaagactctcaaaaattatgaatagasgagaatctcctcaacctgatgaaaaacatctacataaaacctatagctaacataatatttaatggtgagaaactagatgctttcccactatgactgggatcaagacaggctaccccctcttgctgctgctattcaagattatactagaagttctagttaatgcagtaagaaaagaaaatgtatacagactgggaaggaaaaatgtcttttttcacagataacataattttctatgtagaaaatccttaagaatcaatccccctccaaaaaagaaaaaaacatctagaactgacgggattactataaatttgcaggattctatgttaatctacaaaagtcatttgatttcttatatactggtgatgaacatttggaatttgaaattaaaaacacggtatcatttacattaccactgaaatgcttaggaataaatataataaaatatgtacatttataagggaaaccacaaaacttcgatgaaagaaatcaaaggagatgtaaataaatggagagatacactatcgataggaagcctcaattattaagatgtcatttcttcccaagttaatatgtagattcaatgcaatcccaatcaaaatcctagtaagttattttgtagatattaacaaactaattataaagtttatatggaaaggcaaaagacctagaatagccaacacaatattgaaggaaaagaacaaaagaggaggactgatactatccaatttgaagagttactgtaaagctacagtaattaagatagtatggtactggcaaaaaaaaaatacagaaaaataagtgaaatagagaagagaaccaagaaatacattcacacaaatrtagtcaactgatccctgataaaggagcaaaagcacatagtggagaaaggrttgtcttttcaacaaatcatgctggaaaaactagatattcacatgtaaaaaaaaaaaaaaaaagagtcctaacactgaacttacaacttccacaaaaattaactcacaatttaatattgagttaattgagaaatcatttttttggtataaaataatttatgacaaacttctggagaagagtgattagatttagtgttgtaaggtcattgtattgttttgggggaggtttaagatattgattaattttaaaggtgaagttgttaaatatgcatgataaaataccatgaataaacaaaaaaatacagtgtgcaacttccaaaccaatagaaggcagtaactgcattataaaatgagcaacaataacaacatactttaatcaactagaactaagaggcaagaaaggagaaaatagaaggtaaaataaagcatgtsaaatagaaagcatcaagtcctgatataacagaatatataacactaaatataatcccaatacatacaaatgcattttttatttgcacatatttatgggggtaaatgagatgttgtgttacatgaatataatgtggtaatcaagtctggatattaaaggtgtccatcacttaagtacagtacatttttgttaagtatagtcatccgaagctactatcaaacaatgaatttattccttctatcttactataggtatcctttaacctacctctcttcatcctctcccttcacccccactcacctgtcccagtgtctctgatctattttacattaccgctatgtgttcatattttttagatcccacatatgagaacatgcaatatttgtcttcttatgcctggcttattttacttgtaatgacttccagtcccatctacgttgctgcaaatgacatgattcatttcttttctatggctaaataatattccgttgggtacgcacgtgtgtgtgtgtgtgtgtgtgtgtkttgaggggcactttggttgattctgtatctttgctattgtgaatagtgctacaataaatatgctagtgcaggtatccctttgatatattgatttcttttgctttggatagataaccaatagtgggattgcttgatcaaatggtagttctattttcagttttttgagaaatccacatacactgttttccatagtggttgtattagtttacattcccaccagccatatacaagactttccttttctccacatccttgctggcatttgttatttttgtcttttttaaaattatactttaagttttagggtacatgtgcacaacgtgcaggtttgttacatatgtatrcatgtgccatgttggtgtgctgcacccattaactmctcatttaacattaggtatatctcctaatgctatccctacccccttcccccaccccacaccaggccccggtgtgtgatgttccccttcctgtgtccatgtgttctcattgttcaattcccacctatgagtgagaacatgtggtgtttggtttttcgtccttgcaatagtttgctgagaatgatggtttccagcttcatccatgtccctacaaaggacatgaactcatcattttttatggctgcatagtattccatggtgtatatgtgccacattttcttaatccagtctatcattgttggacatttgggttggttccaagtctttgctattgtgaatagtgccgcgataaacatacgtgtgcatgtgtctttatagcagcatgttttataatcctttgggtatatacccagtaatggggtggctgggtcaaatggtatttctagttctagatccctgaggaatcgccacgctgacttccacaatggttgaactagtttacagtcccaccaacagtgtaaaagtgttcctatttctccacatcctctccagcacctgttgtttcctgactttttaatcatcgccattctaactggtgtgagatggtatctcattgtggttttgatttggatttctctgatgaccggtggtgatgagcattttttcaggtgtctgttggctgcataaatgtcttcttttgagaagtgtctgttcattctttgcccactttttgttggggttgtttttttcttgtaaatttaagttctttgtagattctggatattagccctgtgtcagatgggtagattgaaaaaattttctcccattctgtaggttgcctgttcactctgatgatagtttcttttgctgtgcagaagctctttagtctaattaaatcccatttgtctatkttggcttttgttgccattgctttggtgttttagtcatgaagtcttttcccatgcctatgtcctgaatggtattgcctaggttttcttctagggttttgacggttttaggtctaacatttaagtctttaatccatcttgagttaatttttgtacaaggtgtaaggaagggatccagtgtcagctttctgcatgtgactagccagttttcccagcactgtttattaaatagggaatcctttcaccatttcttgtttttgtcaggtttgtcaaagatcagatggttgtagatgtgtggtgttatttctgaggcctctgttgtgttccattggtctgtgtatctgtgctggtactagtaccaggctgttttggttactgtagccttgaagtcaggtagcatgatgcctctagctttgttctttttgcttaggatcgtagtggctttgcgggctcttttttggttcyatrtgaactttagttttttccagttctttgaagaaagtcattggtagcttgatggggatggcattgaatctataaattaccttgggcagtatggccatttttacaatattgattcttcctatccatgagcatggaatgttcttccgtctgtttgtctcctcttttattttgttragcagtggtttgtagttctccttgaagaggtccttcacatcccttgtaaattggattcctaggtattttattttttttctagcaattatgaatggaagttcactaatgatttggctctctgtccgttattggtgtataggaatgtttgtgatttttgcacattgattttgtatcctgagactatgctgaagttgcctattaaggagattttgggctgacacaatggggttttcgaaatatacaatcatgtcacctgcaaaccgggacaatttgacttcctcttttcctaattagataccctttatttctttctcttctctgattgccctgaccagaacttccaatactatgctgaagaggagtggtgagggagggcatccttgtcttgtgccagttttcaaagggaatgcttctagtttttgcccattcagtatgatattggctgtgagtttgtcataaatagctcttattattttgagatacattctatcaatacctagtttattgagagtttttaacatgaagagctgttgaattttgttgaaggccttttctgcatctattgagataatcatgtggtttttgtccttggttctgtttatgcgatggattatatttatcagtttgcatatgttgaaccagccttgcatcccagggatgaagccaacttgattgtgttggataagctttttgatgtgctgctggatttggtttgccagtattttattgaggattttcatagcagtgtccatcagggatattggtctaaaattgtctttttttgttgtgtctctgccagactttggtatcaggatgatgctggcctcataaaatgagttagggaggattccctctttttctattgattggaatagtttcagaaggaatggtaccagatcgtctttgctgtttgtacctctgttagaattgcactgtgattccatctggtcctggactttttggttggtaggctattattgcctcaatttcagaactgattattggtctattcagagattcagcttcttcctggtttattcttgggagggtgtatgtgtccaggaatttatccatttcttctagattttctagtttatttgcatagaggtgtttatagtattctctgatggtagtttgtatttctgtggaatcggtggtgatattccctttatcatttttatttgatttttctctcttttttattagtcttgctagcagtatatctgttttgttgatcttttcaaaaaaccagctcctggattcatcgatttttttttttttttaggggatttttatgtctctatctccttcagttctgctctcatcttagttatttcttgccttctgctagcttttgaatttgtttgctgttgcttctctagttcttttaattgtgatgttagggggttgagtttagatctttcctgctttctcttgtgggcatttactgctataaatttccctctacacactgctttaaatgtgtcccagagattctggtacgttgtgtctttgttctcattggtttcaaagaacatctttatttctgccttcatttcgttatttacccagtagtcattcaggagcaggttgttcagttyccatgtagttatgcggttttgagtgagtttcttaccctgagttctaatttgattgcactgtggtctgagagacagtttgttgtgatttctgttcttttacatttgctgaggagtgttttacttcaaattatgtggtcagttttagagtaagtgcgatgtggtgctgagaagaatgtatattgtgttgatttggggtagagagtcttaatagacttggtccacttggttcagtgctgagttcaagtcctggatatccttgttaaccttctttcttgtagatgtatctaatattgacagtggggtgttaaagtctcccattattattgtgtgggagtctaagtctctttgtaggtctctaaggacttgcttcatgagtctgggtgctcctgtattgggtgcatatgtgtttaggatagttagctcttcttgttgaattgatccctataccattatgtaatggccttttttgtctcttttgatctttgttggtttaaagtctgtttcatcagactgggattgcaacccctgcttttgtttttgctttccatttgcttggtagatattcctccatccctttattttgagcctgtgtgtgtctctgcagttgagatcagtatcttgaatacagcatacttatgggtcttgactctatccagtttagcagtctgtgtcttttaattaggtcatttagcccatttacatttaaggttaatattgttatgtgtgaatttgatcctgtcattatgatgttagttggttattttgcccgttaattgatgcagtttcttcatagcatggatggtctttacaattttgcatgttttttgcagtggctggtaccagttgttcctttccatgtttagtgcttctttcaggagctcttgtaaggcaggactggtggtgacaaaatctctcagcatttgcttgtttgtgaaggattttatttctccttcacttatgaagcttagtttggctggatgggaaattctgggttgaaaattcttttctttaagaatgttgaatattggcccccactctcttctggcttttagagcttctgccaagggatctgctgttagtctgatgggcttccatttgtgggtaaccttacctttctctctggctgcccttaacattttttccttcatttcaaccttggtgaatctggcgatttatgtgtcttggggttgctcttcttgaggaatatctttgtggtggtctctgtatttcctaaatttgaatgctggcctgccttgctaggttggggaagttctcctggataatgtcctgaagagtgttttctaacttggttccattgtccccgtcactttcaggtacaccaatcaaacatagagttggtcttttcacatagtcccatatttcttggaggctttgtttctttcttttcactcttttttctctaatcttattttctcgctttatttcattaatttgatcttcaatcactgatagcctttcttctacttgattgaatcagctattgaagcttgtatgtgcattacgaagttctggtgccatggttttcagctccatcaggtcatttaaggtcttctctacactgtttattctagttagccattcatctaacctttttcaaggtttttagatttcttgtgatgggttagaacatgctcctttagctcagagaagcttgttattaccgaccttctgaagcctacttctgtcaactcatcaaactcattcacagtgcagttttgttccattgctggtgaggagctgtgatcctttggaaaagaagaggtgctctggtttttagaattttcaccttttctgctcaggtttctcttctccccatctttgtggttttatctacctttggtctttgatattggtgacctacaaatggggttttggtgtggatgtcgtttttgttgatgttgatgctattcctttctgtttgttagttttccttctaacagtcaggcccctcagctgcaggtctgttggagtttgctgtaggtccactgtttgcctgggtatcaccagcagagactgcagaagagcaaataatgcagaacagcaaatattgctgcctaatccttcctctggaagcttcatctcagaggggcacctgcctgtatgaggtgtctttaggcccctactgggagggtctcccagtcagcctacagtgggtgtcagggacccacttgaggaggcagtttgtccattctcatagctcaaacaccgtgctgggaaaaccactgctgtcttcagagctgtccctgtcttcagggacgtttaagtctgcagaagttgtctgctgccttttgttcagctatgccctgcccacagaggtggagtctagagaggcagtagggcttgctgagctgtagtgggctccacccagttcaatcttctggccactttgtttacctgctactcaagcctcagcaatggcagacacccctcctccgaccaggctgcagccttggaggtcaatctcagactgctgcactagcagtgagcaaggctccgtgggcatgggacccgccgaacctggcatgggagggaatacgttggtctgctgcttgctaagactgtgggaatagcacagtatttgggcaagagtgtactgttcctccacgtacaatctgtcatggcttcccttggctaggaaagggaaatcccctgaccccttgtgcttcctgggtgaggtgatgtcccrccctgcgttggctcaccctctgtgggctgcacccactgtcraaccagtcccagtgaaatgaaccgggtaccttagttggaaatgcagaaatcacctgtcttctgtgttcaccttgctgggagctgcagaccagagctcttactatttggccatmttggaagcatacygataggagtgggatgttgattttatcaaatgctttttctgcatctattgagatgattatatggttttggtccttcattctgtagattttcagtgtatcatgtttgctgatttgtgtatgttgaaccatccttgcattcctggtaaaaatcctactttatcatagtgtgttatcttttcaatgtgctgttgatttaggtttgttagtattttgttgaagatttttgtgtctatttcatcagggatattggcttgtagttttcttattttgttgttgtatccttgtctgattttggtattagggtgatgctagccttatagaatgatttagagagaattcccttgatatggtttggatgtatgtcccctccaaatctcatgtggcaatgtgatccccaatgttggaggtggagcctggtgggaggtgtttgtttcatgggactggatctgtcagtagtggcttggtgcactctctgaggtaatgagtgagttcttgctctgtgagttcacatgagagctagttgtttaaagaagtctggcatttcctcttttctctcttgctctctctgtcaccatgtaacacacctgcttccccttcacattctgccgtgattgtaagcttcctgtggcctcactaagagcagatgctggcaccctacttctcatatggcctgcagaatcataagccaagataaattctttttaaattatctatcctcaggtattcctttacggcaatacaaaacagactaacacattcctcctgtttgatttttttgaatagtttcaggaggattgatgttagttattctttgtatgtttggtagaatttggctggattcttgtcttgggcttttctttattgagaaccttgttattactgattcaatattgctgcttgttattgagctgttcaggttttctgtttcttcctgattcaatcttggtagcttatatgtttccaggaatgtatccatctcccctaggtttttcagtttgtcaatgtgtagttcttcagagattactgtggtatccattgtaatgtctctgttttcaattttcaattctgattttgtttgattcttctcctttttaggttagtctaggtagcagtttatcgattttgtttatctcttcaaagaaccagctttttgttttgttgatcctgttgtattctttttagtctctgtttcatttagttacatctgatctttattatttattttcttctgctaatttggggtttggtttcttcgcgtttttctagtttctcaaggtacattgataaagattattaatttataatctttctactttttttagatgtaggcattaattgctataaaatttcctcttagcactgcttttgttattcccaagagttttggtatgttgtttctcttttcatttgtttcaagaagtttttaaatttctatttttatttgttgacacagtggtcattcaggagcatgttgtttaatttccatgtatttgtatmgtttccagagttgttcttggcattgatttctagttttattcctttgttgtctgaggagatacttgatatgattttttaaaaattgctgagatttattttgtggtccaacatatggtctgttctggagaatattscatgtgctgatgaaaaggatgtatagtctgcagtagttggatagaatgttaggtctatttggtgtaaagtctagtttaaatccagtgctttttggttgattttctgcctagatgatctgtctagtgctgacagtgagggtgttgaagtcccccactattgtattgtagtctgtctatttagatctagtaatatttgctctatgaatctgggtgctccagtgtttgatacatatatatttagattttatattctcttgttgaattgattccctcatattatataatgaacttcttggcttaaaatctgtttttatctgatataaatacagctactcctgctcacatttggtttccatgtgagtggaatatcttttttcactttttttcatctcttaactttcagtctacatttgtctttactggtaaagtgagtttcttctaggcagtataaaattggatcattttttaaaaayccattcagccattatatctcttttctggttgttttatatattctttgcctctttttttttcttattgtttacactgtagtttggattcctgtagtggtaccatttgagtcttttctcttcctcctttgtgtgattactttacaaatgagttttatacttccatatttcagagttaatattttgagcattttttttgagatggaattttgcttttgttgcccaggctggagtgcaatggtgcaatctcagctcactgcaacctccacctcccaggttcaagcgattctcctgcctcagccttcccagtagctgagattacaggcatgtgccaccacgcctggctaattttgtattttcagtggagaggaggtttctccatgatttggtcaggctggtcttgagctcccaacctcaggtgctccacccacctcggcctcccaaaatgctgggattacaagcatgcaccaccctgcccagccctattttgagcatttcttgtagggtcagtcctagtggtaatgaattccttcagtctttgcttatctgggaatcagtctatttcgccctcatttgtgaaggataattttgctagagataatattctgggttggcagttccttttttttttttcccagcactttgaatataccatctcattctcttctggcctgtaaggtttctgctgagaaatctgctgttagtttgatggggtttcctttataggtgactagatgcttttctgttgctgttgttaggattttctctttatcattgacttcagacagtctgataacaatatgctatgtagaaaaccttttcatattgtatctgcctgagaatcattaagcatcctgtatctgcatgtgttaaatattgctaggcttggcaagttttcatctttgtttcttgtttcttgattatactaataatttgtaaatttggtcactttaaaattgtcccaagtgtcacaaaggctttgcttatattctttaaattctctgttctttgttttgttttactggattatttcaaaagacctgtcttgaagattagaaattattttgcctggttctaagattttaaatgcatttttttcccttcaatgaattattctgttccagatttctatttgtttctttaaaaaaaaatttatctctttggtaagtttctcatttatttcctgaattatttttctgattttttatgttcagaattcacttgtatctcactaagattcttgaaagtcaatattttgaattctttatctgggattttgaaattttctgattaagatctgttgatggagtatggtgttcctttggaggtgtcatatttcttcgctttttcatgttgtccttatgttgatatctgcacatctggtataacagttggttcttcctatttttgaatttactttcataggggaggaatttttcctgaaggtgtatatatggtgttggttggatggggcattttggctttgattctgggtggatgcagtggtgtagtctctatatgatttctttggcagtaaacaacatcagtgatatctgtgatttccttggtaagttatagtgtggttattagcagaggctgtggtgaagttgtgctgaggactgggatgccaggtaggccagtytttaggccctagtggttgcagtggtgggttgagtgtgcctgtctttgtgcctcagtgtggaataccctrgcacctgtgttggagcaggctgattcttggccttgaggtggctttccccccggaggtagtggcagcagtggaccaggtggttggatgtgttctcaggtctctaggcagcttgtatggcatggcaatggcagtagcagtagtaggatgatcctctgcatcctgagtagtgtgcatggatattgggagtggctgtgatgtgctggacaggcaagtctccaggcccgaggttgcacttgcaggtagatttcagcttatgtggtagtggctgggaagttaggcccaacctcagtaccctgtacggaatgttcaggtacccaaggtggtagattgggttgggcaatctccaggacctcaatctatgtgctctgtctcgggaatggggaacaaagtgaggccagatgggcttttgttcagcccccacagtggtgagaggaggcactagctgtgatgggcaggggcagggcaattcttaggccctaggcagagtgcttgagtgaggggcagtagcagctgcattgaggccctgccactggagaggatttggccatcatcagtggccacagcctggaccggcaggtggggaattgtgcctctttcatgccccagttttagtgaggcttgatcccctaccctggtggcggtagcctgcacctaactcatccgcctgcaccagctgcagcaacccctgcccagctcaccaccaattccagcagcaacttgtgtctccatcttagatctcagcaacacatgtctaccagcactgggtgcttcagctcatgtctcactggcttcttagccttggctacaggagcactcccagcttgccctgctgtcccagcagtaatagcctgagtttccttaatgcctcagtcctggaactgctgggccccaggacagcacgacstttgtcaaaggctaggtttggaaatgatgccttgctgtagctgcttaggtctcagaaaggatgtggggcccagtgttaagttctctcctaggagcagttccatttcatggtctcttggcagctccctgtgttagtttcggggcttgggaggattgagggcttttcaagtggccagaattgcacaattccacggtggggatgttggctgctggaagtctcccactcacccatttcccactttgggaaatcactcctggctcccagctgatcccagtcagggaggatgcaagaggcaacctcttttcttacttttggtgcttcctgtcccttctttgttgaattccggtgttctcttggataatatatttgaagtgtgactgtctatatactgttctggtttttctaagtggaggagtcagtcatataaactgcttctagtgaaccctccccaactcaaaaagttaatagaaatatattaaacttgctagttaaaatgcagattttcatattaaataaaatctaaccatatgtcacttacagagacacatcaaaataataaagatatagttgagagcagaaagacaggaaaagataaatgagacaaatactggagaaaggcttgggtagctatgctactattaaacaaaataggctctaaaattggaagctttattagtaataaagagcatcacttcatattgataaatggtttaccagagagatctaatggttatgaacttatattcactaataaaataccccgaaaattataaaggtagaaatttagagttaaggaatatgttgataaatccaccaccatgggaaatttcagcatggctttctcagtgatcatagtacaaacataaaacgttaatgacaatcaagatgatcctaatgcattttacaaaattgatacaataaacacagaaacctgcatcaaataaatactacatttgatcaagaaaatgaaagaaaatatctaagaataaataaattaaaaatacaggttagtggttacctctagtggcagggtgggtcaagctggaggacgggattaggaagaaacacacaggtagcttcagtaatactaataatgttccagtgcttgaatgatgtgttcatggtatattttaatatggtagatcttagcttgcatttatattacatatgtttttaccacatctattaaatataagaaaattttgttcctcacatattctcctcgttcttcagtgtgtttcagatttgttcttggtgtgggaggtactgtatttctgaccatatcaggaaagatgttagaaagtgattcatgtcaataccatttgacctagcaatcccattactgggtatacacccaaaggaatataaatcatattataaagatacatgcacacgtatgttcattgcagcactattcacaatagcaaaggtgtggaatcaacccaaatacccatcaatggataaagaaaatgtggtacatatacaccgtggaatactatgcagccatacaaaggaatgagatcatatcctttacaggtacttggatggagctggaagccattatcctcagcaaactaacacaggaacagaaaaccaaacaccacatgttctcacttataagtgggagttgcacaatgagaacacttggattcaaggaagggaataacacatgctggggcctgttggagggggtgggcggagggagagcatcaggataaaaaagctaatgcatggggggcttaaacctaggtgatgtgatgataggtgcagcaaaccacygtggcacatgtttacatgcataacaaacctgcatgtcctgcacatgtatcccagaacttaaataacatttaaaaaataataataaaaaagaaagtgattcatttcctctctcagcagacattccattctggttaatgttagctaagtgcctatcattctgtctttttaataccaacaacaacctataatatgtcagtggacagttagtccttcacaaccacaatggaaagaaagggatatgaactaatccctccaacctctgagaaacctagattagataggtgccttcttttatggaccatctgttctttttaccttcggttacagcatcacagaattacatgattttagtaagtcagcatttctatattttccaaatgaagaaactgagcaacagtccagtaacttagggtcagatacactttctactttcaaagacctctgtagtaaagcccacatttttcctcatactaattctgaaattcagtaaactacaaagcaaaatattctggtttcttatactgagattaacatggctttaacttaaaatgatttggcatcattgggccatgtttcaagacagagcttgagtggcttattttattttccacaaagtcacatttaaagaaactcttgtgaagatgttgaatcctcgtttcttcgtttaacaaatttgtttggggcatttaaaatatgaaaggtaggcactgaaagatgacactgacttttaaacttttttttttgctttccattttgaaataatttcagatttacaaaaataaagttcaaaaatagtgcaaaaatttctgtgtacayttcatgcagattccccaaatgatcttacaattataaaagttataaaaatcaggaaattaacattgacaaaatattatcatctaacctaaaaatcttattcaaatttcaccaattgtcccaataatatgtattttttttcctggcccatcagagaatccatggttacatgatgcatttaatttttatgtcttattagtgacctttaatttggaacagtttttttcattttactagcctctcatgaccttggcactttaagtaagtataggacaattattttgtggaatatgctttagtttggatttgcctgttgtatcctcatgtttgaatttaggttatgccttttgggtaagattaccacagaactgatcttgtctttctcagcatatcatatcagctgcacatgatatcaatttgtcccattgctggtgacatcagctttaatcatttgattaaggtggtgtctgccaagtttctccaacataaagttactattttttcttttgtaattaagtatcttgaggggagatattttgaaactacatgaatatacatcatacatttttcattgcatatttgcccaccaattttactatctagtgatgatttttacctgaagcagttattactatggtattttacaaataataatcatctaatcccatcatctcttcacatctagtagttggaattctactgtgaagaagagcgcctccttatcccacatttatttatttattcatttaaaaatgtatatcattatgaacttttggatgtctttttcattctatgggtcataatctattaccagcattatttattttttgtttaaattattccagtattgtccattggtagcctcttcatggtgacttctgtatctttttattatcttcctatccatttttaagtatttacttgatttcaggcaccacaatgttccaggctcatcttgtactttccctgatacagttctgaaataaaccatttctccaaggagccctggtcagggaataatgctatggacaggattcaaaactttcgacattgcctagagagctgcaaacattcaagtactgaccatgaagatatttgttattccatgtaccaacaaagttgtccatataattttttaagtgtcattttataagactaggtctacaaaaataataatgtagtaaaattaaaattttaattttggcacaccaggaaaaatagccatcacatttaccatctggtttcaatgtattcattttatttttatttttatttttatgaataatttacagaagtaagaataaagagatggtaaaaaaaacagcaaaataagaatttaaacatagcaaaccacgtttttatttcatattttcctgattttggaggtaatgtaacctgaaattggcaatgcctttgaatgcaaataactggtcatgagctgtcgtatatgaacctagaacattatcatctcgtaaatactggctccagattttaaacagatctctagtaggttatagctcatcattatctctggttcttcctgcatatgcattattatcacagtgtaatgctatggagaaatttgagggttcatgattttgtagaaaagaaggtggccatgtttttgtttcacaattacaaaaatattttcatttttacttttataaatgtcaatcagattgagcaacccaatgaacttttaaaatttctacataatgtctgtctgttccagtcacctttacatatatacctaccttcagcatttgtccatttatgaatatcaagtaaattttatcaacaaatactataaaagataaaataattgtcatatgtccttttatcagagcaggatggtccaggttcttgtgcaaaatactaaatgatgaagtccttcctattaaataattaatgggttagaatatcatgtttcctttttgtctttgtaaatatattgtttactctgattctcaagtctgacagaatttatctgaaggactcatagcccaagattttgcttctatggtcagttttacctcatcattagaatctcaagtgctctgtctctgccttcattttctcattcatctaattattgtgaaatatctttctcttaattttattctttatcccattatgggcagaaaattaagaattccaaattcttaactttgtttaatggaagctgaaaagaatatggcaaagatggcatctctagacttcttttataactttttgaaagatgtattacacaacacaattagaaaactgaaggatgatacagtggtgacattcatttctaggcaatttcgtaatttttttttccttattttagttttttagcacaattagaaataattgatgagtgatgatgaagtaatttctagcatgatgaagtagcaaaatactttaaaatacaggaaatataagatcactaaaatatcataatgtatcttagatcctataatgcatcttagatttataaaatgatcaatagactaagtgatgaagaaaatgagtttaacttactaaaaataagtattttttccttttgatttttggaaaacctgtaagaaacaaaagtcatgaaatatcagtctttacaaataattaaaactgctgcacagagaaacctraaaactgaacttggggccgggtgcagtggctcacgcctgtaatcccagcactttgggaggcaggcagatcacctgaggtcaggggttcatgaccagcctggccaacaaggtgaaaccccgtctctactaaaaatacaaaaattagctgggcatggtggtgggtgcctgtaatccctgctactcgggaggctgaggcagcagaatcacttgaaccccgggcggcagaggttgcattgagctgagattgagtgccactgcactctagcctgggtgacagatcaaggctctgtcttaaaaaaaaaaaaaaaaaaaaattaggatcagtgggccttggtgatactgcaaaggttaaaaagtttgattcagtcacatggtgaataaaaggatagggacatkggtaagaccactttttccctaaacctgataatacccaagaagtggatccttaatgaaactaactttttaattttctccttttgttacctggactttatactgtgttcaaaggagcatgaaaatgtaatgagctatcagctgtgagcaaatttattaaatagagtgaatgaaaagagaaccagaccaataatttaagaattctaactagctcaggcttggacattaactagttctgtttctttgggctgactaatcctggaaattatgtgtattggaaagaacacattgttgagtcagccacaacaagaacctgcttctttggactcaagctccctgcctctcaattttctcatgtktaatagagagaaaaccctgcttcacggggttattgtaagtactaaataaactactagagactgtcagactctggagggctggaactctcttaaccatctttatttttcctgtgactagaagttatctgagtatttattgggtaaattttgttacatgtgtttatgaactgtgtattataaactgtaaaatgtacaattacaaggtcattttgtttgtatcaatacagctgtgttaagtgctctacaaatttaaggtattttcctttatcttaaaaatcctttgggaaaagaaagttatagtttaatcagtgcctccttctacatgggctcatagtttttatcaaatcaaggaaaacatgtaaaaggaaagctttgggacattttctagaatttgatatttaccaagtgtagatttatatttattaagcctcatctctgattattttttaaatggcaggcactaaataattatcattgtttttgtcctaaattagatgactgactggttcataagttcagaaatttcactgtggtgctgtaaattttatagagtaaaacatcttcgtatgtcctctaagattacatggtctaaaaatattagtttaggtttctcactcaataagaatttaaaatttttctggccttttcttttcccttgtcctttaactcatttattacaaatcttgtgagaaattgacttgaataatttcccaaatcttcagtctctttgccattttaatctcaatttcatacatagggagaccaagccttttaagaaatcctggggtgatcatttgaaaattacaccccacttgctaactccccatccccatcttttttggctctgcaagatagcctattcagcaaagggaaataaatctaacttggatttacacatataacttgttgaactaactagttagtttggttagagtcattgttcaggacctgagtataaattargtgaatgcttattgcagcaccattcaagtttccttgagaagtcacttargcctgtggcagagaaagtaggatctaargcttgatgactgtaagtttgatctgctatttaaccctcatggatactagccagagcttgggctaycgataactcttgccttagcatcagtgtatgattgtatgtatgtgagacactctatccttatttgtatctttagttagttgacaggttcatgaaaggtaagaactgtagttagcctttggatgatgttaaagcaaaaatatagaggaaattcctaaattggcgttgagtctagaagggtctcttaaaacacttcaaattgtatacttttattatacaacaagtgttattaccatagtagttcygtaacacttggccgttgactggctgcttatcacctgtgtcacagatcccattctgttatctactcccttagatctttataaacaacgagtggcagaactcagagagtgggagagtgttccctgtctataatccagccacaggagaacaggtgtgtgaagttcaagaagcagacaaggtatgtcttttgtagataaaagatttyctatgaaataactgccttcaaacagcagagcagcaaacatatgctytcagtacaccactacatgctcatgcttcacttttttcatgacagtggatggttcttcctttatttggagtgtttttcttcagttgtgcctcttcctctctaacaggcagatatagacaaagcagtgcaggcagcccgcctggctttctctcttggttcagtgtggagaaggatggatgcttcagaaaggggacgtctgttggataagcttgcagacttggtggaacgggacagggcagttcttgcagtaagtaacctaagaaaacattaagtctttaacccacatttgccattctgctgaaatttacattcttcggctgtattttattttatttttatttattttattttttgagacggagtctagctctgtcgcccaggctggagygcagtggcacgatttcagctcactgcaacctctgcctcccaggtacaagcgattctcctgcctcagcctcctgagtagctgggattacgtgcacgtgccaccacacctggctaatttttgtatttttagtagagacggggtttcactatgttggtcaggctggtcttgagctcctaaaaggatactttgaagcagacctggggaaaaagcaaaggaataggtaatacatatgaaaaatgagacatgtttggatttggggatcagatggagaaggagaaatggaggatcagctgaatatcttttctcactgaattttgaagagaaaactggagcttgccatgactggtaagtaccttcttttctaaaactccccctccccatgacaaattaaaaacagtcaagcaacaagagagtcaccatgctgcttgcagaaaacgagtatcaaatgattcttatgagaatgaaatagaacaagtttttacctccccagagttaacctctcttgagtaaaargaatccttcagaaccagaggggatggtacggacctctcatacacttctgctccgtttgccctgtcattctgtgagccagtagaaaggagagacagcaggagatagcaacttcctttcactaaaacaatgattttcctcacataacgaacttctcctgccctaatgggttttgttgttgttgctgtttttaaaataaaagtcaatttcttagagaatataaactttttggaaactgaaagcatttaggaatgtatgcactatacatttgggatctccacctggtatcaatgaatatttagggtttccttgttcagtcagggcattcaagccatgagtactatatcctttcccctacttgggaaaataggtcactattgggcttgcttctggggaaggaatcattttttccctttctcagtgtccctcctaccatagttcttcccttctaccatccccctcaggaatctgttcatagtatgggaacaaaatgattcctttatggaaatggtttgggattctagctatatataacatttatgtgtatataaaaatattttctaatctggcactctagggaatactcttccaatgaggtgtttattcatactgtgaaaaaggtgtttcatggtgaagaaattcctccttgcagattcacaagacactgggcatattaaaggctcaggaaaagcctactaaatgcttctcaagcttatttgagtctcatcaccatttttctggctaacataccaatatcatgcaaaaccaagttttttgggacacattacttgtcttttcactggattatcattttcttgagaattaaacttgtattttacctttttttggtaatcctagcatggttcttagcacataaatggcaaatgagggcacataggttgtcaataaatgactgtttaattgagctaaagatatatgatatctatagcattggattaacactgtgctagaagatgattaattaatttctccagttatattttcatataataaaactcaaatgcctttctttttcttctctgtgtctcactgatcaggtctcttttcctaccacacctaaatgagattccygttttaaacactctcaagctatgagaaaagtgagttttagtaagaggtagcctgtggaagaaaggggagctcctgactggaaaactgaagctaatcctgcatccaaagtaaacacaattgaaaatagtcctagagctggcaattgtcagtggatttgactggtgtcggcagctcacagggaccatttaggcagcccaaattctggttattgacactattcactctaagctgtgcagatttcggtgctatgctagctgtatagagaatgtaatgcctatcttgtaaacatatacatgttctaaaaagtactaggaaatagtttgattcccttttttaagggtgagccaatatacagtgataagtaacatgatatttttaaataagcttcattttatacacatactaagtagataaattacactggaagtcatagtattttcatctcattgattggagaatattttaattttagctttgtcagagatcaaataattttcacaccagtatgtcttataaaatacacttgtaggaaaaaaagaaaattacaaacatgtttgttaatttcatttgtcgaacttgtaacacctttaatatttctcaagtcaaaatactcttctcatttcagcgtgttcattgtttttgttacggacttagccagttcaggaacatgtcgttaaaataacaatgtttataatgtaaagcagttcaatattgctatttttattaaatggagcagatatttcactcttaataggtaatggttgttaatgtaaatgtttacaaaaaaccagcctttaagttgttaacatctgggcttccctagaggagatcttgtttatttggtggtaataaataaacttgctgtgcaccatggatattccatttctcagcaggggtcttggcagctgtggagaacactttctattctcatcagttgcataaagagcccatgtttctgctcctctttatggattcagattactggtgtagatgccaaaaaatccccagtgagctctgatcattaatataacggaagctgttttgacaagcagaacatttytttatcattagttaaagaaatattgtgttaacgtatttggatagtggttactggaagcacaggaatatgcacatatatactcattgtrgtttttactaggaactagaccaaactgrcagtactagaaatctttttatttgagaattcatagttgaccaggtatgcaactccatatgcatttgtattctctctcttccttttttcttctgctctagaaattagtgtatcgctggaaagttctggggacttagtatctctccatttctcttccaacagaccatggaatccctaaatggtggcaaaccattcctgcaagctttttatgtggatttgcagggcgtcatcaaaacctttcgatattacgcaggctgggctgataaaattcatgggatgaccattcctgtaggtatgtgaaatctgagtacgttgaaaaggaaaacgtgaaaccaccagaaatgcgctttggccaccaaacacaaacagcagtcacacagaatacagatatgagcacacttacagcagttagaactgagtgaagaaccaaccaaattatgtcactgactctgacaacatccctttttctatagatagaaatatataagtacaggggcatgccacttaatacatcattcatctaaggaagaggtatgtatttgtcagctggtaagtggtcagcattgtgctagattaggtgcyggggtaggtatgaaggggcattattgggtggagggaagtcatggaaaattccaacgaggttaagacttgctccttgccctcctgaaacacataagatctactctttggaaggaaatattctaagtgttaacagttgtctctgagtggtgagattatggctgattttcagtktctttttaatatttttctctactttctatatttctcgaacggccrtgaattactttcataatctatacaaacaacactaatcctaacccctttttattattaagattcaggttacatgacagaatcaacaatacaaaaaacttaaaggcccctataggagtgttataattgggtgctaagttgtgtactttacctgtcagtgctgtagccctttaaatgagagggaaagtatggaagactaaagcaactaaagcagtcagtgaagagatttttatctgtgcttgaatactagtgatagctaataccaattgagtgctttcacagcaaccccaagagaaaggcactgttayaaacatcttcagtttacaaaagtggaaagaggtctggcgaagtaaaattagttttcctaattcacagagtaaataagttttagagctaaaactttgacgttagaacctaggcttgtaaccacttcattagagaattcaaaatagatcctaggaggaagagatatccttataggaaagggatggactgaaagagatagkragtggtgaatagacataaggaaaggaaatgcacatttattgagtggatactagatgccacttagcactgtgccaggtgttctacctgtgttctccagaaggcagtctgctttccatggagagtgcatagtagcaggattggaaagtaatgctcaggacttcgaagtgtctcttttgggccttcttagccaggctgagcagtactgatttactaaaaaagggagtggtttggctgatagtgtggatggctgggaatagttcttctccaatttaatgtgctcatgaatcactgagggtctttttcaagtgcagtttttgactgaataagtctggggtggggcctgagactctgcatgtctaaccagcttctggtcctctgcattgagtagcaaggagaggatgcagcagaaccaagttaggtggctgttgtgatgcctcatgtaggtgtggtatgacaagggtaagaataatttacagtgagaatggagatgatttagagacaagacttccaaggattattttttaaattgcccctacaaatgatgatgacatgtggaatgttagtttttagaaaatgggtttctgattgtaggggctcttcccttccatctagaggtttttcccttgttcaactgactgagaagggtggagaagattgcccttggggaaagtcagaatcttagttcagttctgactctaaggatattacagaacagctgttttccagcatcacttgcaagatgtggggatggcctaagtgaggtagaaagtcactattcgttatgagcatacctattagagggcctgagaattaaaacctttgtcaacagtgggacacatgtcagtctttttaggtgggcctgtcctgtatcagtacagaaaggtaaatttacaagatcaaagtccctagttgttggtttttttggtccccactccacctgtcatttcattattaaaacaacaaatatgtttcaggtgtttaaatatcttttcaaactatttacaaagctctgaggaagattgtgaaacagaaggcaatgcacatagatctctatttggcctaacggtaycttggttttcttttacttcctcaggagggaagatcctgattagataaagctaaatattgattgacatccctgataatgtttgaagctttaatgtaacttgatctggcaatagaggtggttggcccataagcctcactgttttcatctgatgcgttttggagatcctgtggatgcttatctacgagttataaatacagggcatagaaaaggctctcatagggctctcacagtagtctttccccactttactcattaactgttgttcagtcaatgaaggaaaaaaaatgatgaattcttttaaactctaagtaactgtttttccccaaaaagtttttctgaaagtgcatttagagtcatactaggatgaggtaccctccctgccatcaggcctgttggcagaattctcaggaggctgaagtttgggtcataagagctctctscatggtgtctcaaacagatgagggaaggatggaggtagaggttaacttggcagctgtcctctcttttccagttttagatacatttgggcttgcctagaggccacttagaattcagccaacaatgtctttagctagtctagtgcttagtgaatgtagctggactaaatcaggggagtcataggggaagatcacagaaaggggtatcgtaatcataattattcacttgttctcaaatttgttcagtaaattaatccatttgtatttgtcttttgtaactccataatttaacatcagcttcattttgtctctgcatacttggcttttttttttttcacagtgaagtctggaatataraaagtccgttagtctttaaccatgagatctttattgtgctaaatgcattttcctacaaaacaacctaattttatgttgggaattataaagaaataatgtactttatatttgcatagaatttaaaagtataaaatattcttttatgtacaatatctatgtgattctgtgtgtgatctgatgagatagtctggattttaaatggtattttacccattttacatctaagaaaataagactgcaagggtttagtgtcttgtagaaggtcacatggctagtaagtgggagacgtgagattcaaacttaagtgttgttctgcctaagccatgataaattctcttcttatggagattggttcagcaaggcaggaaggtggccctgatgaagtctttaccccagtgcagatttttatactaatatgatgaagtctttaccccagtgcagatttttatactaatatatggtttattctcatcattcatagtagttatgttttataaagttgtcacgaacactgaattagcaaatacggaactattgctcctaggggaaataaaagattaggttcctgtgagcttctgatcacaacattcttgtctgctgatcagagaatggccttgatttatgtgtttctgttgaaagattctttgtttaatatatattgttgatttatgaacactgaactcatggccaaccagacagaagtactataactgatgcctgaatgaagcttgtgtgacacatgtattttctctgtaaggcacattacagcattcttgcacttaggaacactagacagcactcaacactatgcttaggggccattttaaacagcaaaattgtgaacaaaaggcacaaaaatatgaaaaatgtggtactaaacagaccacaaaaaaggacacttttttttttttttttaacaatatgagagctgaagcaagaaggcagagtgtcaccttgctcaaccccagctgagaatttgtgcatcaggtgactcaaaattttccctgctttggggaaatgcaaattaaaaccacagctgaaccacctcactactgcaaaaaaaaaaaaagtccataatttaaaaataaaaaaaatagatgttggcgtggatgtggtgagagggaacacttttacacactgctggttgggaatgtaaactagtacaatcactacagaaaacagtatggagattccttaaagaactaaaagtggcactaccatttggtccagcaatcccactaatgggtgtacctacccagggaaaataattcattatatgaaaaagacacatgcacatgcatgtctatagcagtacaatttgaaactgcaaaaatatggtaccaacctaactgcacgtcagccaacgagtggataaagaaggtgtggtaaatatgcaccatggaatactactctgacataaaacagaatgaaataatggtctttgcaacatcttgaatggagctggaggccattattctaagtgaagtaactcaggaatggaaaaccaaatatcttatattctcacttctaagtaagtgctaagctatgaggatgcaaaggcgtaagactgttataatggactttggggaaggatgggagtggggtgagtgataaaagactacatattgggtacagtgtacactacccaggtgacagatgcaccaaaatcttggaaaccactgctaaagaacttattcatgtaaccaaacaccacctgtactcccaaaactattgaaataaaaaaaaaaaaatccctgctttggatatacatgcccgtaaatgactctgagaacactctgtacttatttttgggttacaaataaattttaggtagtaggcaagtccttaaatatggaatccacaaataatgaaaatcgactgtatctagagcctacttttctcaagatagcatttatgaagcttaaatgttctggaacacttgaggtggggatctccctgcctagatcctaatcatatgggtaaagggggctttcatagtgagtgtcagagatagtaacacagttctgtttggtcacccataaaaaaagaacctgaaatagggttttttgttgttaaatttttagatgtaagactgctttacaacattgaattatactccatggttcatccagcataacatctctaacactaaacaaccaaaaagaatgggaagaaataagccattatgtctttcactcattcccatttgggaaggctagggaaaggtatcatgtaattggaagggattttcttttacctcctttctgtggcatcaactttgatctcttattccttcacccatttcttcatacattcatttattcarcagattttttttagcatctgctatgtttcagctcctgtattaggcattggggttacaaaggcaaataactaagatgtttataggacagtaagaaaaacaagtagcgaagcaactgcaatatagtgtgatctatttagatatggaagcatgaaatttggtgggacaccataggagagacatctcctagtattaaggcttcctggagagggtggtgggatgtctaagtgataacctgaaggacaagttaagtgaacatggagtcagggacattacaggcagtgggartagctggcacaaagtatgagggaggagagtaccatgagttagtggatctaaaagtataagcagatatgaaagacagtagagccccaagtctgggtcagccatgctgcaagttttattctgtaggcaatagtgagtcaccaaattaaataggtgagtgccttgatcaaaattacattttaggaattgcatcaaatctgtatattgctttggaaagtatggtcattttaacaatattgagtcttctaatccatgaacatggggtgtttttccatttgtgtcatcggtgatttttttcattagtattttgtacttctgcttgtagagatctttcacctccttaattaaatattgttaggtattttggaggggctattgtaaataaaatgaacctaagtgctgttcaatggatgactggataaaatatatatatatatatgtatatatacacacacacacacacrcacacacacacacacatcatgggatactacacagccataaaaattatgaaatcatttcttttgcagcaacatggatggggttggaggccattatactgaaataagtgaaataacccagaaacagaaactaataccacatgctttcacttataagtgagagctaagcggtaggtaaacatggacatacggagagacctaatacacattgggagccttcaaaaggagggagagtgagagggggctgaggattgaaaactacctgttgggtaccacgttgactattctggtgatgggcgcactagaagcccaaggctcatagttatgcaatatatccatgtaacaaatctgcacataaacccgttgaatctatttgaaaaattgcattttagaaagagcactttgactacaaatggataatcagttagagacagcaagtacttgttttatttctccccwtaaaggatagatttcactttgactacagatggataatcagttagagagagcaaatacctgcttaatttctccccgtaaagggtagccttcaactagaatacttgggaaggagacaaaagggttatctcatgaccacttttgagcaatgaaaaagtgggtggctgcttctctctctgaattggaaatttctcccaccactcttcattctgtttcgctcaaggcccacagctggatgttattgcacaattatgcaatactagtttgattcacaagagtcttgatgttgtttcctttacaacactatccattatttcctgccatggtacccartggagccattgtctctgaccataaatcctaagctttgacccttttacgatggcagtgcctaattatgatgataaataataatcattactatgacctatggaacacttttttacctgttacattatcgctaatgttatagcagccctaaagaaaagtattgttttctccattttgagtatttttaacctgtattcaaatcctcttctctcacgtctacaacctctttgtgatgaaggaaggatcmacgcttggttttcatttacttagggagaaatggaagttaatttgtattgccttagatttttctctgtagcaagtgttgattttactgattttatgtaagcagaaaaaaatgtccatgttttaagctgaattctgatattaaaatggacttacgatatgttagcatatagaaaaggttaaaaactacccaggtcatatataactttccatttcaccctcttccagtttaacctgttaaagaataggatacaaatacacaawgatagtgattcagatcctaagattttgccttgaatcagcttgatctggtttactgtcattaacaaatgcatagggtgaaatctgaagtattcttgttccatcagaataagagtgaggggtgatttgctctgcccacctaacaacaaccagggcttgcttgttagtgggacctgaattgattgtgacaggaggtcatgaagtcagcttcacaaggaacctttttaagaggttgaagctgaaaagggcctcagggatccctaaggctgatctcctgattttacagagaaggtccagagaagtaaactaacttttgttacgatcatgtagtggaatagtcgtagagctaagctatcttcatgacagactcaggaacataatctaacttcttagaaactaccagcagacttytgggaagaaaagcatcagtacacttcatactaacatacagtttcagcgtttgtataggcatttatagagtttatcatcatagttataaaatgttgggtgaggtctgttcaacgtcaacatgatgggaatctgctacagtacatacataatggaatagttcaatgtaatcatctcattttttaatactgtggtcatcaaagaattgccagctccttgaaaggtaattctgtctacaaattagggattggaagatgaccttcattcactgaattgtgttacagatttttatgctattgaataaaatcgtttttattgttactaggtatataaaatttgctacagttcttgtagtgttcttagtgttataattggaagctatttgacttccatatttgacaaatttctcaatttctggcacatttcagattcttctgattttatcactgtttatagattgcttagtcatactcactctagtttatattaatatataggatgtgccaatgcgagatatttttatgagactaaaaattccatcagtttctttcaggcaactgtaagatctgatttaagaagtaatgtttgccttgaatgaattatccaaataattaaatttttctaattaaatatttctctctcttctgtgtagtttgataaggccccatcaaaaaacatagaacagtggctcagtagttcgcaaatatagtagaggcttattgtactgttgatctctagcagcaagggcttttcttaatataattatagaaatggctcaatgcacacatactcagtaaaatttaattcacagctcagccaaattcatagcmtaatgaagtatttaattgtaagatttttatattttccataagttgtaaactactatttggtcattaaaagcacccaggtatcaaaactcatcagaaaagttacctctgactgggtcttaaaataacccccctttaagagcaatatctgttagtctgcgttttaccttctgagtgaaagggaaaagagacagagatcaaaagtcctacacgtgtgacttagtatttgttttgatctctcatcttttctttagttttctccatcatagttgtgttctcacctattgacctacaatgtggtatccagaacattttctggtgtccccatcaaatgcagtccttttttatgctaagtctgagcrctctctgtaatccctcatatttgctaagaagatccaaaaccattcataccctacaatggagtatctgaatttgggtggagactgtttttatatcaggctgttgagcttacagcacaaagctagagaaatgaaggaaacaaccttctaagtcatcctgccatactgagagaccattgttagcataaaagatggaaaattggctttaattttttctaggcagagaagagtactcattatgtatcatctgaggtatagatgagagggagaattaacactgtctccayttcgagttggctctgcctagatgaaagggagagaggcgcttagtcctgggctcacctattccagggaatgtttctctgtagtgttccctttataacaagtttccatgtgttctgtgttcatattacaaaagagttgtcattgaggttttttctttgtttatttttaccccatttgtgattgttcttgacattatactctaattctgtgatttgtgattatccacctaaatccaacaccttcctcacaagagtcattaatatgtttttatgggtaaagaacttgaagtctgaagacccagatccaagtccaggagcctcaaccagtggtgccactttggacttaacctctctgtgccatattttctctgtttataagatgctgataatgatagttgctctatttttttcagagagttttgagtgtaaaatgagataaggatgtgaaaattataaggctctacagaaattctaatagtgttttcattctttttttttttttttttttaacaattttgaagtattaaaaatacagatcagattctcctacactatatactcctttcaggaaaattagtagagttattagagagacaaaaaataaataaaaatgaaggcagacaactgtgaagcaaccatagggcatcataatacacgtggactcccctttacactcctgatcttgctactcagagtgtggyctgtggatcagaagcatgagcctcagctgagagcatgtagaaatgcagactctctggtcccatcctagacctgttgattcagaatctgtatattcacgagatctccagttgcttagtgtgtacattcaagtttgagaatcaccatatagcatcccgtgtagcactggtagcattcaagatgattctatacagtaagcaagtaaacttttttaattttaattccttggtttgaagaatattagaagaaaatattaccagcccatgaaacctgttattttagattttagattttccttaaggctaacaggtagctatttacatatttctaacaggtgagttaatttaacagaaattaagtaaatgacagagcaaatgatacttggaaatggcaaaaattatgaaggtggcttttataactggtcttacggtaaccctgatttagaagttcagtgggattcatagtagggtyttagtagctgtgaatgacttytggggtgctgttagccctagctgaaggtgcccacagaaggcttagctcttgtgtttgtcagacaccccagatcagactaggggtgtcacctttcaccatccacgtgaaaatgcaaastgagattacaaggtctagggccctttattttattttagttctggattacctgtgcaggtttgttacacaggtaaacgtgtgccatggtggtttgctgcacctgtcaacccatcacctaggtattaagcccagcatgcattagctatttatcttgatattctgccttcccccacccctccccagaaaggtgccaatgtctgttgttccccttcctgtgtccatgtgtgttcagctcccccaatacatgaaaatatgtgatgttcggttttctgttcctgtgttagttcctgtgttaatggcttccagctccatctattgtccctgcaaaggtcatgatcccattcctttttatggctgcatagtattccttgatgtatatataccacattctctttatccagtctatcattgatggggatttgggttgattccacgtctttgctattgtgaatagtgctgcamtgaacatacacatgcatgtatctttataacagaatgatttatattcctttgggtatatactcagtaatgggaytgctgggtaaaatggtatttctggttctcggtctttgaggaattgccacactgtcttccacaatggttgaactaatttacattcccaccaacagtgggaatgtaaacaaagtgggaaataggaacagtgttcctatttttccacacctttgccagcatctgttgtttcttgactttttaataattgcccttctgagtggggtgagatggtttctcattgtggtttagattgcatttctctaatgatcattgatgatgagctttttttcatgttttttggctgcgtgactgtcttcttttgagaagtgtctgttcatgtccttttgcccactttttaatggggttatttttttcttctaaatttgtttaaattccttgtagattctggataktagacctttgtcagatgcatagattgcaaaaaatttctcccattctgtaggctgttcactctgatagttccttttgctgtgcagaagctcttttgtttaattagatccaaattgtcaatttttgcttttgttgcgattgcttttgacattttcatcatgcaatcttgcctatgcccatgtcctgaatggtattgcctagattttcttgtagagttttcatagttttgggttttgcacttaagtctttaattcatcttgaggtaatttttgtataagatgtaaagaaggggtccagttttaattttctgcatattgctagctagttttcccagcaccatttattatatggggaatcctttccccattgtttgtttttgtcaggtttgtcgaagatcagatggttgtagatgtgtggtcttatctctgatttctctattctgttccattggtctgtgtgtctgtttttgtaccagtaccatgttgttttggttactgtagccttgtagtatagtttgaagtcaggtagcatgatgcctccagctttgttctttttgcttaggattgtcttggctatatgggctctttaggttccatatgaaatttaaagttattttttctaattctgtgaagaatgtcagtggtagtttaatgacaatagcattgaatttttaaattactttgggcattatagccattttcatggtattgattcttcctatccatgagcatggaatgtttttccatttgtttgtatcctctctgatttccctgattagtggtttttagttctccttgaagaggtccttcacttcctttattagctgtatttcttaggtactttattctgtttgtatcaattrtgaatgggagtttattcatgattkagctctctgcttgtctattgttggtgtataggaatggttgtgatttttgcacattgattctgtatcctgagacttagttgaagttgcttatcagcttaagaagcttttgtgctgagacaatggggttttctagatataggaccatgtcatctgcaaaaagagacagttttactttctctcttcctatttgaatgccctttatttctttctcttgcctgagaaagaactggccagaacttccaatactatgttgaataggagtggtgaaagagggcatccttgtcttgtgctagttttcaaggggaatgcttccatcttttgcctgttcagtatgatattggctgtgagtttgccataaatgactcttaattattttgaggtatgttccatcaatgcctctactttattgagagtttttaacctgaaggaatgttgaattttattgaaagtagcctcctttctttgtcccttcaactcagtgctcttttgggaagagttcaagcacaaaaatagcgtttattttttaatttgctacttagactaactgtagggactagaagattctgtctctttccctgtgttagcctgtagctaaatgyttttcaaatatgtgaacggtttatccaagagagttttaattcctcataactcagtttctcttgagacacaattatggagtcaaactcaattcctcatgaggtccgacttttaagatttttgtctacattttcttccctttcacttttttcggtaacttgtgatattatttaagtaaaacaactaaatgtctaagcatcataaaatgtgtagggggaaatggtttatgaattgccatgcagtgcttgtgtagttgccttgtgagtttttttttctgaaccattccrggttcctacatgtgctgctaaaataaacacgtgtactcttctgttcatcttccaatttttttcctcagccccatttgcactctttcttgacattactctctgattctgtggtctgtgactatccacctgaacccatcaccttaaccaacttasagagttcagttgcagaagattttcttgtaaatgaaactctagcttattgatcagtggtgttgctcctcatgaaaaaccttttcagagatttacaaattgaagaagcatggtaatttgtagtcttgtaaagaatgatatccagaagattctttagttatctgcatacaaagctaaatagttaatttgatgtttaaagtattactcagacttcatactgtcatcctatggacagttgcaacatcttcgctattttttctcgtaatagatattttaaattaatttcatacagttgcagaatccagcctacttctgaatttcttccatttaaaatatacataaaacaaagtcaagagataagtagcagattggggaaaaatctttgcaatattatgacagaggcctaatttccttaatatccatagagctcttcaaatggctaaaaagaataacccaatagaaaaatagcaaacaatataagcatgaaaagatgttcactctatcattaaacataaatcaaaacaagttgcagttttccagctatcagattagctgaaatgaaaatgttggaaaaacctcagtgttaaagagtaggaaaaatagcgtgttgttgaaattatgaattgttaaacttttctgaagggtgatttggcaatatttttgaaaatctgaaatgtacatacacttagatcaagaaattccacagatatgaaaagatatgtttgtaatgatagtctttgcagcattatttataatagcctaaactgaaagtgacttctatgtcccttagtaggagggtttacagtagtaacattgtttattgagcccatggaataacctgcagccactaaaaagacstcctagctttacaggaaaaaaaaaaaaaagagggaaaaacaaaatataaaagactgaataatatcccgtttgtataaaaaaaaagaggataaaaggatcctataaatacttgtatgtgaataaaagttccttgaaaagaggaaacagataattatggcaagagggggtagagatcagagatccagaggatagagagtgacactgggagagtaagagagagagagagagagagaggccaagactttaatgtaattatttaaaaaataaataattttgaatatgtcaaaacaattttgtgtgataaatgtgatttaggtgtgttgagagacagtgataaacaatctgattcatatcgcttctcttttcccgacccacacagtcctcctgtccccaccttcatttccacctataatagttatgctttcatgaatattagctgagtgttttcacttgccttaggggactgcttttgagagagaaaacragtatcagtgaagtggcctaagggccggcagtggagggaaaaataaagactttgcccagtatttaaaatgaaaarctatctgctaaaaatgagccattctttggtaattttaattaaccatttaaaataattcagataaaagcaatgacattttcctaaagatgaatttggtttggacttcctgtataattatttcagttgcctattactcctgtaaggaaaacaaggttattaagtttttctgaagctctttttcttttagcccctargacattctcatttctatgtctagtttgggggcagacgctttggattattgatggagttctttttakaaatggacttttaccttctttaaatagccctggacatgcctatgtctcatcactacccaggaagtacattttgacacctggattgagttatgaaatatatcttttactcctcactttttccagttgccgagcattttaaatttgcccaatagcattttacttagtttattttaatacttcagaaagttatttaaaggtttgttgactcagtttttaaatcaaacaactgttctacatgttattttaatatttaacataaaattcaatttttacatatttttcagctgtcccctctgccaccctgaggacttcttgtatcataaatttgtcattcattttgccttagagatcctttcctcaatactgcatttgggtgtctgagagayatatccagaaatatgctatgtccagtgttaggcttctaccagctttcatgcacggttgagtaggatgttttttcaagtttatttctgtttgtttttttttttttttttttgcagccaccaaagttctccctttgcattttttttcctaatctaaactttctgggagtgaccatgcttttttctttcagatggagactattttacctttacaagacatgaacccattggagtgtgtggacagatcatcccagtgagtgtatttcctcgcacctcgtatttattttcatttgacccagttctcttaaagacacataaaacatggtcctcagcgatgtgtgttttccattactggaggaaaaaaaactgagctcatgttgttgacatatctttaacagcctccctgcaaatgcttatttgaacaggttaatagggtttcagctctgttaccaggagttgaattctcaagtcatggaattctcatgattaaaataagcaaagcacagtgtattaataacctgcccttggttattatgtccrttctgcttatggaaaattaatgctttgttatagttgtttattttttagaactgtgactcaccatccttccaggcatattattttatatgatcttttaatcccattctttcccactgtttcttttctcaagaatctagatagaagatgctacagaagacacagcactacagttaacgtcacagtcataattgaaaccatgccgagctgttatgtgtcttgtaaagagaaatagatgtagtgcttagtgtttggattggaacattaaacattgtccctttgttcctgtctgtctctcatacacacccttggtacaatacaaaacatgaccrtagcttttaacagtactagctaatagttctggcagggatttcaaggggatgctcaaagtaaactcttacagtatagacaagaagttttcttttttcaaagtacagtagtataactcaagataatctttggcattgggaaccaaagatgtggggaagatataatatttatttgaataattgatgaatcccaggttactgtgaaatttattagagaatgccaagggaaaatgagaggtttgatttaagttctcttgctcttaaaggccctggggaaatcctacttggaccagctctgggatgaggtctgtcaccttcctcgtaggattcaaacttacttttcttgcccttgcccagactctcaacgctgcagcttcactgacaggacaagagctgcttgtcagccagctctggctcaattactgcactttaagatttatacactgtagatggaattaaaacattacggtggactcccaagtttataaacaactaaggggaaaagaaattgggtgtttggtgaaggcaagacacttgtatatttttgcaagcttgccagagccagtgagaagccttgaaggatggcagctgagatgcttcaggcagaaacacattgtggtcaagggctgaagccaggggatgaggatttctgttttctttcttaatgaaattatcaatgacacctgatagtactgaggctcatgcctgagcttatgacaatacaagcttaatatctttttaaaatcagtttaaaccattttagaccccaacctcatctactcatgtaaatgttactgtagtctccaatagcttcttttacagtggaaaagagacaaatgaaaatttttgcatactcatcagtatatgcagtttattttttgtaatcatatatgtttgtgacaatgcatgtatctaaagaaaaagtactaccttgaaatacacattgacttaactacaactcagttagaattttctagtttttccatgttgaagagctttcataccagtgtgaaaattgtgatgtaaaaatctcagatgcaagaaaagttttcatacacgagaacttattggaaccaaagcctaattaaaaaaaacataaaaacagtgacaaaacaaaacaaagaagtaacaaaactcccttttcacagtgggatttcttttggtgggtagttggagtatagtaattggttggtcagagagaaaaggagagatttccaaggtcagtgctattctattcttaatgaagtaattgaaaatccaaacatctgtactttgtagtggacaagatttatgtcgaggactagtttgagaaatatgagaagtcacagcttgaaaacaaagtagtggaagaatgtttttccatctatcaactttgagttttttcctttcagtggaacttccccctgctgatgtttgcctggaaaatagctccagctttgtgctgtggcaatacagtagttattaagccagcagagcaaacaccmctcagtgcactctacatgggagccctcatcaaggaggtaagagaaacrgacttcgggagtgcttctgactccccttacagctggagcctactagagcatatctcatttaacatgatgcatcagctttcatcagccacgtttcctcctgttctgttttcttaggctggctttcctcccggggtcatcaatattttgccaggatatgggccaacggctggggcagcaatagcttctcacattggcatagacaagattgcattcacagggtctactgaggtaggtatctgaaaaaccagggcttgaggaacagtcttgcaaatgagttgaggggttacaaaaacaataaaactagtacccataggctagacaccaaaagggcagtgagtacccaagcccacaaaggataacattggtgtcatagaacactggtggatgtgaaagcaaaggcacacagggaccatttgaccccacagatatctgagcatttttgtgataccatctgtgtaagaactatcccagaakgtggggttctagacactttgttgaatagcggcagaagcaagttaagaagctggaaatctaaactagtctctggtaaggataagaatggagacacaagctttcccttctcattgtttggacaggtccggtaggtgcaattggcaactcactataccccatgaaccttaagagatgatatagagcagggctcagcacattttttttctgtatagggctagatagtaaatgtaaattttggaggcaacgtggtctctgttgcaactactcagccatgccatagtatcaccaaacagtcatagataatattgagtgtggctatgtgccaattaaagtttatttatagacatggaaattggaatttttacataatttgtatggattacaaatgctaatctttttattgtttctagacatttaaacatgcaaaaactggttttagcttgtaggccataccaaaacagcagggtatatttgacccatgggccatagtttacagatccctgttacagagtcacaagtcagcttaagaagatttataaatgttactcaaatatctctgatccaggtaacagatgataggaaagtctgattcattgtttcaagtagaacctcacagatgatatcatcattgaacaaaggatgtccgcaggtctagaacagtgctatctaatagaatgagagcaacatttgtcatttaaaataagctagtagccacattaaaaaatacgtgaaattaatgttaataactttaatccagtattttcaaaatattgcaacatataatcactataagttattaatacaatattttgcattctttttcatatgcattctttgaaatatggtatgtgttttacattgacagcacatctcttcagactagccacatttcacgttctccattgccatgcgtgctaccgtattggacagcacagatctagaaacattttatcagttgatacagagttaattatacttggttaaactgactcacagtagtaaatttaataaaagatttattaataaacttgaatattaattcagttagattactgagttttgtgtttgtcgagttaaccttgtttgtttccaaatattttattctagttgtatttgttattgtaattttgcagtttaatgaaatatttaaaccaaaatgtgagtatgaaagggaattattaattattctgaagtttaatgctttgaaaatatttgctaaaggctagatgctaagaaaaactaaagatgcaatcaatttaagacaactgtaaaagactggggaaaaatataaacctagatagaatgggcacctggaattgctttgcaaatgttcttaagtccttacttcactttaaggaaattgaaaccagaaatcataaataataatttaggggtgtgatttaatcagaagagacaggtggacccatgattaagtaaagttcttggttctatatcaaaagactggagaaatgaaatatttaaagtatctttttctgctttaacctttttctgttgaccaaccaatggtcctgattgagtcagtcaagaggcttctattgtgtaatttttttttttttttttttttgagatggagtttcactcttttgcccaggctggattgaagtggcacaatcttgtctcacagcaacctccgccccccaggttcaagcrattctcctgcctcagcctcccaagtagctgggattataggcacctaccaccatgcccggctaattttcgtatttttagtagagacgggggttttgccatgttggccaagctggtctcgaactcctgtcctcaggtaattcacctgccttggcctcccaaagtgctaggattacaggcatgagccacggtgtccggcctattgtgtaactttttaaattaaaaatgacagcataatatgtcaaacaagagataacaccttgtcatgttagtacctacatctccggcatttatttttaacagctgcatagaatactcttgcatcagtatatcatcatttaatcctgtattaatgtacacttgagggtgktttttccactaatttttcctattaaacagactgctgaaataaaaacctttggagacccaagaaaaattttacttgtaaatctgtaactgtatacacatatgtatatacgtatacacacacgtatatgtgtacatattagatgctcagttggatatggttctagaagtggaattgcaaaataaaaacatatttacaacttgcttaccaagaaggccttagagtattggtttcatttataagaggttaggtatgttaatcttttgtttgttgtagaatttgaaaatatgtttgttctttgctttttaatttttttaaaacagttgtttgccatgtgcagattttaaattctcatgtagtcttctcctttagtctttttctgacagcttctggatttcctgtcatttttgaacaaacccctttaagattatacaaacggcccttaatattttctttcagtacttttatggttttgttgtttaaatctttaatctggttggaatttattttcatgtataatgaaaggtgagggttgtttgtttataaatgaatgtttagttacttcaaaacaatttattaaacagtctacccctttgcaactcatctgaatataacattacatgatgcctgaatataacattacatgatgcatttccatatatacaggttggagcaaaagtaatttgattaatggcaaaaactgcaatgacttttgcaccaaactatacaggaaatttctgttttagagctcataattttttctgttctttcactagtaccagactgccttaattactaggttttataagatgtgttactataatataggcaacataccctcttatttggtttttcaaagcccatttattcttttagaagaaatttcaaaccgattttctaagtaccttatgttactctaaaaaactttgattggaattttgattggcataacattacatgtccatattaaaatgaggaaaaatgctatctttaccatattgactcctcatctaggaatatgatataatatgataaaaatcccttcaattatttgttgtaatgttcatcactgatgtcatcatataggtgttaggaatttcttgataaattaacttctagcatttaatgttttcttccaagatatttcagtctaaaaacgagtaacatttttgagatggagtcttgccctgtcacccaggctggagcgcaatggcgtgatctcggctccctgaaaccgctgcctcccgggttcaagtgattcgtagctgggactacaggcacgcaccaccatgcctggctaatttttttatcttaagtagagatggggtttcaccatgttggctaggctggtcttgaactcctgacctcatgatccaccagcctcagcctcccaaaatgctgggattacaggtgtgagccactgcgcccggcacataagtcacaatatcaggtagtggaagttaaattgaataaatggaatctcctctttcaggccagacaagaagccacatagtgagtccataaaaccataagtgcttattgcaaggcagcttgggttcaaatctgttttgccactgaagatcttttaacgttttaaatgactttactgaagtataatttacatacaataaaatgcacccatttaagtaccatgtatatacacctgtgtaaccatccgaatcaagatgtagattgtttccatgccttagaaagatttctcatgcctctttgcaggtaacacccttggcttctggcaaccactgattctttttaattatttttgcctattctagaatttcatataaatggaataatatctactcttcgtgttttcatttttgttgttcaacattcaatgtattaatgatatggtcgggtctaaaatcccccattttgatttgttttctctttgtccatattttccctctttgtctgccttcttttggatgagttagataattttaccactctttttattctattttgcattattagctgtacctctttttaaagtgtttgctttagtgtgtacaatatgcacctcaatcacagtctaccattaaatactttatgttacttcatatacagtgtggtaaccatacagcagcattgttccaatctcatcctttgtgttattgttgccctataatttacttagacataggttatatgccccacaatacattgctgctgtttttgttttaaaatttgttttttgaataagaatacaaaattattgtctgtttactcacatacttgctattcctggcctccttccttgtttgtgttgtaggcccatttccttctggcataattttccttatctgtaacgatctttaacgtttcttgtagygtaggtctactagtgatgacttctctcagcttttgtttgtctaaaaaatggcttcattttgtcttcacctttttttttttttttttttgaggggtcagcctcactgtcgctcaggctggagtgcagtagttgctcaggctcactgcaagctctgcctcccaggtttgcgccattctcctgcctcagccttccgagtagctgggactacaggcacccgctaccatgcctggttaatttttttgtatttatttttagcagagacggggttccaccatgttagccaggatggtctgkatctcgtgacctcgtgatccgcccgcctcggcctcccaaagtgctgggattacaggcatgagccactgtacccggcctgtcttcactttttaataactaacttttttttctggatataaaattctaatgtgacagtttgtgttttattttactttcaagacttcaaagatatcattctggcatgtttctgactttactgtttctgatgagatacagcaatcattgttatctttattttacggtaagtaatgtttcttttcccccagactgcttttgagagagtttctttttgtcagttttcagcaatttgattgtgatgtacttttgtgtattttgttggttcgttaaaatttctgtatatctgtgagtttatagttttcatcaaactgggaaacattttgaccattattttttcaaatcttttttttttgctttctacttycgccttctgtttacagatatgttaggtcatttgtcattatcccatgggtcactgggactcttttatttccagcatttttttcctttgtgcttccggctaggtaactttcattgtcatctttgacgttcgtatattcttctgtaatgcttaatctgcttcagagattttgttaagttctagaaattccatgattttttaaatatcttatattttcttcctcgctacacccctttattcctttaaatttgtgtagacatctattttacaatccttgtctgtggccgggcgtggtggcccacacctggaatcctagtactctgggaggctgaggcaggtggatcacctgaggtcaggaatccgagaccaacccggccaacatagtgaaactctatctctagccaggcgtggtgttgcacacctgtagtctcagctactcaggaggttgaggcaggagaattccttgaacccaggaggcagaggttgcagtgagccaagatcacaccaccgcactccagcctgggcgacgggagtgagactccatctaataataataataatataataatgaaatccttgtctgttacttttaacttctctgtcgtctctgaatttgactggagtttttcctgtttatgggtccttttttttttttttttttttttggcttttctgttaattttgaaaggatactggacattgtgaccattatattgctgaacttagagattttgttgtttttctttaaagaatgtcaaactttttttttcctaaaaggtagttaagttacttgaggttcagcttgtctcttttggaacttacctttaagctttgttaaractagtttattcttattaataagctgaaatccttctgaggtttctgttgaatgtccccagtgttcaacaagatctttcttatctgtctggtcagaattcagaccatcatattctgctttggtctcctcataccatactgcaatctagaaagtttaggcacaaaaggatttccttttctctagattcatagtcccatactgcctgatatccaatgtttgaataaaacaatttcatatacttttctagttgtttataatggtaaaacaagtccagtgtcggttactccattacaattagaagcagaagtctctctggcaccttttgattaattttgatattgtttgattttctttaggtttcatgcagatcacctttacagttaatgaggttactattttatttacttcagttggtcaaaccaaagtattaggaatacaaccataaggacatactggatttggaaaagcccttgatttaattaattaatattgaatatttaagcagtactttactctcataagtaactcctttttcatctttgagctgatttgcttatcagtttagtcttgatttttataagttttactttcaaaagatggcagtttctggtcatatatgaagatttgtggggaggacattctctttggagtctatcccttaggccttctcagtacctcaaatagtatcttatgtatagtaaacatacatagtaaatatttgttgctacatgaaggaggaaagactgaatttggtaaataaaaacttaatctcagagctagaaggygaggtatcagtagaaccctcccctgctttaaaatgccaccataagcatagggtttactattttttacttcatagctatataattatggaccagccacttggttttgtacaaaattggtttaataatagcatacatacctgtttctcagggtcatgggaattaaatgcaatatgagtttgggaaattttaagcagtaagcaaatgttagtttgtaatatgacatcagcatctcaagaagggagagagctctaggggttgggtggtctatcaaggtttcaagagaaagagggatttgagggtctgtaggatatagataagtagagtgaattgggaagaaagggcagtgttagtcaacaactcgaagcaggagaacacaaagtcttagtggaataacggaattgggaagggactggggagaaacgttgggagtcagatgaactgggaaataatatgcacatcaaggcattggaaataattctgggtcaaaaaattgtggccaacatgtagaagataccacagacaaagatatcacaagaaaactatataccaacatcttatgagtatagatggaaaaatcctcgacaaaatagtagcaaacaaaatccagaaatatataaaaatgattatataccatgaccaagtgggatttatcccaggaatgcaagattggttttatatatgtaaaaaaatcaatgtaatactccatagtaatggaataaaggacaaaaaccaggtgatcatcacagaagaaacgtgacaaaatctaataccacacagaaacatgtacaaaaatgttcacagcagtattattcctaattgccaaaaagtggaaacaactcaaatgtccattaaatgataagckgattaacaaaaagtggtctatccatacaatggaatactgttcacccataaaaaggagtgaggtatttatacatgctgcagcctgaatgagccttgaaaacactataccaaatgaaagaatccagttacaaaagactgtatcatgtgactgtatgaaatatccagaataggcaaatctataaacagaaagttgattagtggtttcaaaggactgggagaatggaaagtgactgctgatggaatatgaagtatctttttggggtatttatgtcctcagatagaagtaatggttgtgatggatgcacaactctgttaatatactaaaatccactgaattgtacacatcaaaagagtggattttatggtatatgagttatatctcaagctgtgaaaaatcaattaattttacaaagtattaaaggctttacattttggatattaatagccaacattgatttagcacttactttgtgtcaagtacctgctaaatgctttgaatacattattacagcaaccctacagcattgagcaaagtgtggctaagaggggttacattacctgcccagggttacatgctagttagttgtagggccgagagtcacacccagggcctatattccatattacagtggtacactgcctcccaggctaagggactatacaccctcccataggggagagccattaaaattcggaatgacatattaatggaggtacttaggaaggataatttctcagtgcagcatgcttaggtcatagacacattgtaactcctttttttcctaaaattcacttcaaaattgcatctttagcctctttaaattccatttgttacaatacagggtttccatttgacactgtctgatataggacatgaaaatttaaaacttaagttgtttccagtcaattccacaaacatttatcaagcacttatagatcttggagaggcaaaggtggtgttttatgtgattcagtctagcccaagagataatctgtgaatatgtaactattagagtgtggtgtgttatgggagcatggagagaagagaattctctgcatcattacctaaaaatgtcatgattttcaagatgataagatcaaggacaaaactaaagttctgtcatttmatataattttcaaatgtatctgtatctaggagaagtgtcatcagttgaagatatttacatttgaatgaaaagctactttattcaaagataaaagtattttaagaaaaagataattctccatcttaattccacagttgttaatagtcacaactggcaagaatttaaggctgtcttccttttctcttaacattaatctctttggagaaaatggaactgtagttttatgggaaccaaaatacaaaaagaaattcgaggaaaggaatgctagctgtgaggaccctcgtgagtcctcagggactcacaatgtgttatttgatattggcagataatcaacaaatagtggtatcatttattctcaacatcatttcctatgccagatattaaagaatcagcactttgtaaaagctcgatacatattttgctggaaggtaggatgggatattaggtttcactgtttcctttcaatagcgaatgcagttttgttgtcattcctgcagttgtacttttaacagtcatttaaacaccagagctgcagattttttttgaattcagtgtctatccttagaagtctctttaataggatgtgaaaaaccttatagagatgggaaaataaaaacaaacaacacatccctaagaacctaaatcataccagatgggacatgttgagaagggtagtgtgtgtctgatttcctagggtcgttaactcttggtaggtgagccaacactgaacatgacatgctcagtgactgctaaacatgtagcctcagtgttctagtgagagtagttaatagtcagggggtaccaaagtgtgtaaaagctggagaaaatactaggytttcctcaacagtgatttcccatgaatcatctttttacacttcagattatattattcttaaccacattgagggcaagtaatgtccatctacaaaactatgcagatggcttgtcataagcaaagataattcccaagctgaacagtaaatgatcaatctgattaagctaattatcaacaaagaccaacccataaagtttaacgttactttaggatttttacagcattaatgtagttcagcctgagttaatttctcttcatcctttacttagagtctcttaaaagaaaacaaagtactcctcagtgctttcttaaaatgaaagtttgacagaatagtatatcacaactctatagtttgcgtctctctaaaccaactaaaggaaatcatcactttttcagtaagttttgaacatagtcttcaaatcatactaaaggaatcaagattaaatatgtcagtcatatcagaaaactagacaacttaaacatctattatacttgagtggattcattcacattacatgttattatttaatctttccaggcctcagatatcccagctgtagattagagatgattgtacctacctcatggattgtgaggatgaaagatgatttgaatgtgttccccagaaagagtgtgtttgttatttaatctacaatgcaatagtgttgagagatgggcactagtgaggggtgttcaggtgggtactaatctgttaacccacattaatagattaatgccattataaaagggcttgagattkcacattgaatctcgtgctgtcttgtcgtctcttgctcttccatctttcaccatgggatgacaccacaggaagtcgttcaccacatgtgggtctctcaaccttggacttcccagcctctcgaactgtaagaaatraatttcctttctctattaggtatccagtctgggacattatagctaaactgaatggactaagaaaagctagtatatctagagtgtttagcactggatctaattcttagtaaagtgtcagtaaatattaactgtcattgttttctatttatttttaaaatgaagtttatgggacaattaatgcttggggaagtgtggtataatagatgaggcactggatttgatccacaaatcatggatcaaattccagctttcctgctgtgtgacttttggcgaattgtttagtctgttatttcatgtcttcttccattagtaaggcctatgaatcactccttacaggctcatttgaagattgaaataatgtatttgaaagttccaagcatattgcttggcatatagtaagaattcagtaactattaggtgaatctgaaacttccatttgcaaataatatatttgtcaataactacattctgctctcctctggcagctttactctcctttcgtttattttgtagcttttgtaaatattttacaaatatttttggctaccagtcagtgtttgtgtgtgtctgtgtgtgtgtgtgtgtgtgtgtgtgtgtgtgtgtgtgtttkctcttctatttcacttcttggaagactgccttcgtgcttgcttggataaaatgatgatgaatcctttttcttttttggtaaaatagtgtactagatttagaatacagtgcaggaacccaggagctggttttttgaaaagataaacaagatagaccactagccagactaataaagagaaaaagagaaaagaatcaaatagacacaataagaaacgataaaggggttatcaccacggatcccacagaaatacaaactaccatcagagaatactgtaagactaaaccaggaagaagttgaatccctgaacagaccaacaataggctctgaaattgaggcaataattaatagcctacccaccaaaaagaaaagcccaggaccagacggattcacagctgaattctatcagaggtacaaagaagaggtggtaccattccttctgaaacaattccaaacaatagaaaaagagggactcctccctaactcattttatgaggccagcatcatcctgataccaaaacctggcagagacacaacaaaaacagaaaatttcaggccaatatccctgatgaacaatccagcagcacatcaaaaagcttatccacccctgtcccgtgtggccccatcccgcagcctgccagccatgagttccacgcagttcaacaaaggcgtctagtatgggctgtcagccgaggtcaagaactggctcctgcccaaatatgacccccagaaggaggcagagcttcacagctggatcaagggactcacctgcatctccattgagcctgacttccagaagagcctgaaggacgggattatcttatgcatactcatgaacaagctgcagccggcctcattccccaagatcaaccactccatgcagaagtggcaccagctggaaaacctctccaacttcatcaaggctgtagtcagctatgacatgaaccccatggacctgttcaaggccaacaacctgtttgagagtgggaacatgaggcacatgcaggtgtctctttttgccctagcagggaaggtcaagactaagaggccgcagagcggggtggacattggcatcaaatactcagagaagcaggagcagaacttcagtgacgccgccatgaaggctggccagtgcgtcatcgggctgcaaatgggcaccaacaaatgtaccagccagttgggcatgaccgtgtatggcgtgaagaggcatctgtgtgaccccaagaatcacatcctgcccccccatggaccactcgatcattggcctccagatgggtacaaataactgtgccagccaggtgagcatgacagctcctgggacgcggcagcacatctgtgacaccaagctgggaaccgacaagtgtggtaattcctccatgtccctgcagatgggctacacccagggtaccaaccatagtagccaggtctttggcctgggccagcatatatgtgaccccaagtactgcctgccaggcacagtggctgacggggctcccttgggtgctggcaactgcctgggcccaggagaggtccctgaatatcccccttactaccaggaggaggctggctactgaggctcccagcacactctctccccacattatctccctttctgggtttttgggtttttctgtgttttcatcttttttttcttaacctgttcagtgctgccaatcaaccgagggtctgtgagtggcaacgtggaatcaggcagcagggctttcttcccccttgccttggtccytcgcaggaatgagccaccaggctgtggaggagaaggggtcamggccatatcccaatatgtgtatggtgagggtccctgctggcacgtccaggctgccagcagagctgtgccggggagaagagacctgggcttggagggaaccagtacccggaggtttccagttgccttgcctcttcccacttttgtcagccgatcagtttgtggtttctatacccgcaaaagtttcaggatgcattaacaaaagaaaaatacatttttttttcctgaggaatggggtggggacagtggagagggtgctgggaaatgagtcccctgggaaagggggcctgtctatgatgctaaatatctcaggctcccaagtggctggatttccctaggaccctcaggccaacagacctcagacctgcctcagggcccagtggggaaagtgaggcctgtacaaggaagtggatgctgagtggttgggcctaatccccccaactccccacaccaccaccgtggcctcagtagggtttttttcttagtagttgttgcccagtctggagtgcagtggcatgatcttggctcactgcacctccacctcctgagctcaagggattctcctgcctcagccccccaagtatctgggattacagacatgtgccaccatgcttggctacttttgtatttttagtagagacgaggtttcaccatgttagccaggctggtctcaaactcctggcctcaggtaatccacgcaccttggcctccctaagtgctgagattacaggcgtgagccaccgtgcccggccccttagtaggtcttaaggagccccagcccttctccccttctgggcctgaccagctatactgctccatctcccccggccacatgcccctccaagtactgcacagggaccccccacccaggggmcctgctccatgagataatgtgaaataygactgtggaccaaacacaataaaacctctgtctgtaaggaaaaaaaaaatcttatccaccacaatccagtcggctttatccctgctatgcaaggctggttcaacatatgcagatcaataaatgtaatatatcacaaacggaaccaatgacaaaaaccacatgattatctcagcagatacagaaaagtccttcaataaaattcaataccccttcatgctaaaaatccaataaactaggtattgatggaccatatctcaattagagctatttaagacaaacccacaggcaacatcgtactgaatggacaaaagctggaagcattccctttgaaaactggcacaagaaaaggatgccctctctcaccactcctattcagcatagtattggaagttctggtcagggcaatcaggcaaaagaaagaaataaagggtattcaattaggaagagaggaagtcaaattgtctctgtttgcagatgacatgattgtatatttagaaaaccccatagtctcagcccaaaatctccttaagctgataagcaacttgagtaaagtctcaggatacacaatcaattgcaaaaatcacaagtattcctatacaccaataatagacaaacaaccaagtcatgagtgaactcccattcacaatgactataaagagaataaaatactcaggaataaaacttagaagagattggaaggacctcttcaaggagaactataaaccactsctcaaggaaatgagaggacacaataaatggaaaaacattccatactcatggtatcacaaaaatggscatactgcccaaagtaatttataaattcaatgctatcccgatcaagctaccattgactttcttcatagaattagaaaaaacgactttaaatttcatatggaatcaaaaaagaccctgtatagccaagacagtcctaagcaaaaagaacaaagctggaggcatcatgctacccaacttcaaactttactacaaggttacagtaacaaaaacagcatggtactggtacaaacacagatatacatagaccaatggaacagaacagaggcctcagaaataacaccatacatctacaaccatctgatctttgacaaacctaacaaaatccaagcaattgggaaaactggctagccatatccagaaaacagtaactggaccccttacttacaccttatacaaaaattaactaaagatggattaaagacttaaacgtaagaactaaaaccataaaaatcctagacaaaaacctaggcaataccattcaggacataggcatgggcaaggacttcatgactagaacaccaaaggcaatggccaaaattgacaaacrggatctaattaaactaaaccgcttgtgcacagcaaaagaaactatcatcagagtgaacaggcaacctacagagtgggacaaagtttttgcaatctactcatctgacaaagggctaatatccagactctacaaggaacttaaacaagtttacaagaaaaaaaaaaaaacatcgaaaagtgggcaaaggatatgaacacacacttcgcaaaagaagacgtggccgttaaacatgaaaaaaagctcatcattactggtcactagagaaatgcaaatcaaaaccacagtgagataccatctcacaccagttagaatggcgatcattaaaaagtcaggaaacaacagatgctggagaggatttggagaaataggaatgcttttacactgttgatgggagtataaattagttcaaccattgtggaagatggtggcaattcctcaaggatctagaactagaaataccatttgacccaacaatcgcattactgggtatatacccaaaggattataagtcattcttccataaagacacatgcacttgtatgtttattgcagcactattcacaatagcaagracttggaaccaacccagatgcccatcgatgatagactggataaagaaaatgtggcacatatacaccatggaataccatgcagccataaaaaaggatgagttcatgtcctttacagggacctggatgaagctggaaaccatcattctcagcaaactaacacaaacagaaaaccaaacaccatatgttctcaytcataagtgrgagttgaacaatgaggatgcatggacacagggaggggaacatcacacaccggggcctgtcgggctaggggagggataacattaggagaaatagctaatgtagatgatgggttgatgggtgcagcaaaccaccatggcacatgtaaaaaacctccactttctgcacatgtatcccagaattcaaagtataattttaaaaaatacagtgctggaagaagatgcctggtacctattaaggaactcactcatgatttcttgctgtggcctagagtggtggccactccttcaaactgagtttgccagaatggaattctggtrtagggagaaatttctttgcagaaaaatgttacgtagtttcctttgttwttcagtagttgtgcaaagaccaactactgccagtagtctgcaaaggacaacaaagagatatatggcataatttctgtaatgaagtaatatttttgtttaatgtacctttattaacagctttattgtagtataattgatatacaatagatttcacttatttaaagtgtacaatttgataagtcttggccatgtgtatccatctacctgtgaaaccatcagtagagttcacaatgaatatgtccctcaccctcacatgtttcctagtgcccctttgtaatctctctgtcttatctctctctccacccccacccccacattcccaggctttctggcactatagattatctgcattttctagaattttatataaatggcaacatatagtatatactcttttgtctagctgtttttactcagcacagttattttgagatctgtctatgtcgtgcatatcaattcgttcttttttattgccaagtagtagtccatttatgggtatatagtttaactattctgaattcaaaaaatctgaaatctggaatgcccccaaaacttgaaacattttgagcaccaacatcatgctcaaaggaaaggctcattggagcattttggattttggatttccagatcggggtgctcaactggtaagtataatgcaaatattccaaaatctgaaaaaatatcccaaatccaaaacacttctggttctacacattttgataagggatgttcaacctgtatcaggtttaatagccattcagccaatgatgaacatttggatttatccatttgttgtatgtttgtttatccattcagccactgatgaacatttggattgttttcagtttgggactaataaaagcttctatgaacattcatgtacaaatatttgtatggacatgtatgtccttttctcttaggtaaatacctaggaatggaatggctggattgtgtggtagggcaggaaactgccaaactgttttccaaatcsgttataccatcttacattcctaccagcaatgtttaagactttgaactcctttacatccccaccaacatttgatgtggttagtcttttacattttagccattcaaataggtatatagcattgtctcaatgtggttttaatttccaattctctaccattgagtgtcttttcatttgtgtatttgccacagcatatcttctctggtgaagtatctttaaatctttgcacactttggagacaagcgttgtttgttttcctcattgttgaattatgaaaattgttagtatattctggataaaagtcctttgtgctttgcaaataatttctcccagtgtctcttaaagtttttaattttgwtgtccagtttattaacattttcttttatrgatcaggcttttggtatggtatctaagaaatctttgcctaacataagatcacaaagactttctcatatgctttttttctagaaattttatagttttgtgttttacatttaggcctrtgatctacttcaacttttgtgtatgttgagaggtaaggatccaagtgctagatagatggataatgacaatagttcctgcaccatttcttgaaaagactaccctgcctccactgaattgcctttgtgatgcttgcttttttcaagcataaattttccatatttatatgggtctatttctttctttttttttttttttttttttgagatggagtctcgctctgtcacccaggctggagtgcagtggcgcgatcttggctcactgcaagctctgcctcccgggtttatgccattctcctgcctcagcctcccaagtagctggaactacaggcgcccgccaccttgcccagctaatgttttgtatttttagtagagatggggtttcaccatgttagccaggatggtcttgatctcctgaccacgtgatccaccagccttggcctcccaaagttacaggcatgagccactgcgcccggccctatatgggtctatttctgtactctctgttctgtttcagtaatctgtgtgactgttgcatcgcaagtatcacattattttgactattatagctttataacaacaggaatttttttatcttcacaaataaaacattaacaactacctatgcaatcttccaatactgagatattcaatagggaactgagagagagagagagaagggagaatttgggaaagagaatagggtggaaggtgggtctttgaattgttttgcttttaggaatagttaaaatattaagtagcctattacagtgtgaatagagcaagttttcagctaaactttctaacagaatctacatttgattcttctctctctgtagagaggcttacattcatttggaggggaactaatcccgtgacttctaggttatctcttagtttcttctctggaatgacattattggcagacactaaaggacttaagggagagcggcatttgtctagaatataaaagccaatttgtaatttccatattagtagtggtggatggagaattttcacaggcaaatcaaacgatcacataatccccaaaccccttttcagctgtagttatttacttctttatccatttattctaactttgcaggctacctgagaagttgtatagattcttccagagtgaacatgtcacttaaatatggattagaacatggcttctgctgtgattaccttagggagatgggacctattggtacattacaaagtgtctggaacagttaacaagaagaagcttatttgaggtggctgctttccattttactaaagcaaaaggcctttagaaagccaacaactttactcagattaaagatgggattaatttctccttatgcagctaaatacataagcagtgcatgtaaatatttaataaatataaaagagctcttataaacacaagtcaataaacaacttcaataaagtacaggaaaacaatatgcattttgcttggtatagtgttttctttactcaggttaacaaacaatgatctcatcattagcagcaagatagtggagagaccatcaaagcaaactacagcagagtccagattgattcgtgccaaacaaatgtttgtagctaacagctgtattatcactcattctaatttacgcagctggggttcttttatttcctaagtgagataaatgtcatgttgcatgatacaagcaccatctctactgcttgagtcatgaatcaggtcagctctctcctagttagcttcacccctcattttaggttrggggargtggcttgctacagttttagctataaacagctaataggcctttttctaaggttgtgtgagtccattcgtgaatcattcagtattttatttaaaaataccagtttgaatgtcatgaaaatattgaaaaaaccagtttcatgtggaaaaacctttggttgtgtaggttttaaactattagcataaaacttctctttttaaaaaattcttaaaacttgaagactgaagaataagtatggtatagtctctgcctgctggatgagattccatgatttattctctaactatgctaagtcaaagattctgcagttagctttctccccaaaactcaggctgagtttgagcaggtcctaaggtgttgatccctttagctcacctagttaatgggacatagagtacttttggcttgactactccatgctttttcctatcaaagcagaccaagacaatcaaaaccttgatttttaaagcttacctgaaatagagtcttatgtaacaaaaggatggctaagtgtacaaggcagttgaacatgttagtggtagatgatgcatttaactgtcaaaatgctactcacagcaaaggggaaccaattcccaggagaaggtctggagaagaggagggagaagagcytgaggcttggtgtgcacattctgagaccagtcctggctctgccactcagtgggtgcctgtttgcaagtcatttcttgacctctgtgagtcttgtcttgtctttttttccaattataaaatagaataataattcctgcctcccagttttgtcatgaagattaaataaaataatgtttgtgaaaacaagtagacagaataggtgctcaatcaacaataacattagctggacacgatggctcacgcccataattctagcactttgggagatcaagaccagaagatcgtgtgagcccaggagttcaaaaccagcctgggcaagatggcaagccccagtctttgcaaaaaaaaataaaaaataaattagccaggcttggtagtgtgcacctgtagccccagttattcaaggggctgaatggcgggattgcttgggccaaggagttgaaggatgcagtgagccgtgatcacaccactgctctcaagcaattttcgtattctggcttattgacttaacaaattattgaaagtttgtctgggccctggtggctcaggcctgtcatcccagtgctttcaaggcctaggcaggaggaccccttgaggccaagagtttgagaccacctggtcaacatagtgagaccctgtctgtaccaatttttttttttaattagccaggcatgatggcaagtgcctgtagtcccagctactcaggctgagttgggaggattgcttgaactcagaatttcaaggatgcagtgagccataatcatactactacagttcaaccttggcaagasagtgagaccctgtcttaaaatctgtgtacatatgcatatttttttaaaagtcagtcattgtagtcggggagacagctattaaacaagcacaatgtgagagttacgtacatagcactgtgagatcagagaaggaacaccaaaccctgtagggagggtagggaaggaaagctaccttctcagaggaggtgaaagagttatctctgtaaaaatgagtttatcaagtaagcaaggggtgaaaaggcactgcaggtagatggagcagcttatgcaaagacacacaggcatgttccagaaagggcaagtggttttgtgtgcctagagtcgtgggtgagtggtggtgggaatggtgggacagaaggctggaaacatagtggttatactggccttcataatctgaatttcacagataaaggtttaaactgctgttaccacttaaaggaactgcttagatgccttggtcctgtttgtttctggtgsaaatctggacagattaatttggcctgttatttctgggtacttcagaaagacaaacacccaatccccatatttttggcatttctattcccaacacagttggaaccaggaagcataacaatgaaaattaagaaaggwgaagagggaagaagcagagagtaaatctgtttgggatttatgaaaagatattacaagacacaggcatctttractagtttactgggatctctagtagagatttttccatttttaaaaaggtgttatatcgctgagaaaaatctaccttgatatgtgtaataaaatagctctgagtaggaactcacctgagtaattaataaaaaaaaattttacccaactttagaaactgtgttcagggagcaactgccctgaataaagagggcatgaaaagccttttgtgttcctttttgtcctgtataacaaattatttttcttgcaaagccccaaattgctttcccctacattgccgcattgctgtgaacatgattccagtacactgtggctcttccagggatactcctgatatcaatcttgaggcctattcaaacgaggatgggagtcagagttgaactgtgccagcattcctgctgagaattagcccagtttcattatgtgtggaggagcccccagttcactgcccttgcatgtttggggtacacagagctgagaggctctgcagggagtgcaaagttaaggaactgcatgataggaacactatcacttactctttcataaggagctctgggcagggaaactaaaaaaagatgaggtttttccatcattcagtgcagctgtggtgttctacttgtaacaagctacttctgcttcataaggcaagaaaaacacaagaattgtgaacagactctcagaatgagcagggtccccaggagtcctgtctgtcttttttaactccttcaattaactggagtactaagggagagatttgttgcttggcctgtgccttcattctacagatgcagaagctgagacccaggaggagaagtggctttcccaaattgaagattcattagaagccagagtttgtagtaccaggtcttctgactcctgtgggccaaactgtcgtccataagcctaaatatggttataattagccaggttgtcagcaatggggcaggaggtatcacacgagtacgttgtaaaatcttttctgcttggaagaaaaggtgatggcgaactaaaaatttgatctctgtgcctttatcctatttaatctatattacatcatatacaggatttaatttctcaaactgtatgtttacctgttttatcttacaaattaccaatttcatcagaataggacttggtatcatcaagtacagctctattaacttgacttttaaccacttggaaaacgtgtgcacccttgcagcctcctttatcttgccgtgcactcccaccttctggtcatgtcaggagggacagtatccctgaggaaccacacttaaacttttccattttagaaagattggtcaatcctaggcctttgttgtatgcgtaattcgttcattcttatactttctaatcccacaggctttgacttcggaaacctttgggttataacaaagtactgaggaactgtaatttaatctgttcagatctaatattaaatgagacccagatttttttttctagtggactgcaaagccacatttattgaacatctactaggtttacatgggagtccttttagctgtgaattccttattggtaagggactatgcccaacagtgtacctggcacatagtaggagaactatgaatatgtgttgaatgaaggacattggtgaaaaccagggytgtttaggagtgtcctgtcctgaggccactccagatggaagtggttctcccatagcctaacacatcccrttctttcttgaactataactcgactttcttccaaagatgaaggggaaaggtatcattcatctgagatttgccttgtggtgtttaccgagttagtgggtgcagcgcacaaatttgttttctaaggaaaggctggtaaagcattgatgcaaggaaaattattcttaggtattcttctctgatgatcatagactgaaacttttacttttgtatagttaccatagccatgaaaataatcactggccgacatttctagtggcaaaaaaatatcaacctctagaatggtctgatgaatatcagggagtagggctaacagaaatgtaatgccagctgggccagcagtgtctgccaaccccaaatatttactcagcatcttactatgtgtaaaactcatgatttttcctggcttttgcttgtttcttgaatataatcctgaaggcagaatctaagttttgtaactgatgatttatgaacattatttttgtctagaagaggtgatattcctacctactttgaaatcagcttggagtgcagggataagattttgatggtatgtggcacacattagtgctcagtaaatgtagaaaagagaacagaaaaatgacagaatgctgggaggaaggaagggagaaggagagggagtaatcccaggcctgggctctggcatcagcctgcagatagtccaacaggttctgtcatgaaccagctggggagcctggtgacattcactaacttctaactcatttagctcatctctaaaatgagataaaacctactgtgtagggttttttgagaggcttaaatgacataatgcttgtaagtatctaacatagactactcaataaatactggtttaatttaatgaataatatgtttgtgaattccagtaattgtcttgttgagaaagcagttacctgtttatcttccttgactttaaaatgagtccacatcagttaatttggattcccccagagtggagcgagcaagcacaatgacattctcagaagagcagacagtcacagatgacagcatcctcagggaacacccctccctgagtgctggcagtaagtcagaggattgctgtttccccagttgcccttcggtgtgagttcccccttaccagtcataattttcagcattcccagaagagagggccagattctccttccctttgtgtttgcctgttttcttctcagaggaccatgtctgtgtgagaacagggcctttactgagaccaggtcttcctgaggcctttgcgtggaagtggaagagacacaaaatggcaagggcgggggaagggcagtctggcaggttggccacagctcacccatcaaacttcagggmcaggtgttagcattttccaacaccttggtaagtcatgttttcagcaaatcaagaaactctagttctgcatctttgagagacatcactttttccccctaaggttagcttttctcaggatggggatacattttcaaaatcttttttaggaggaggcagagttacagttaatgagtgatattggagactgaggggaagttggagtttccccggtgtttttctgaaggagttaacagcacaggcagtttgggagatctacgggagacctgctttggaaggtccagctgtctcctttacatcacccccatttctgtccattgaacgtggaagaaaagggaggccccrgcttctcacacttgctcatggttagcatgtctgcacacttactgtgtgccaggctgggttctaagtgtcatatatggtacaccacttaatcctcaaaatataattctgaagtacatagtatttttatccccccctacagaggaggatccaaggctcagatagtaaataaatttcctaggctcaaacagttacgaagtgacagaactggttaaaaaaaaaaaaaaaaaatccaggcagtctggctccagagccttttctcctagctggggttctccgctgcctgcgaagtcgttagtcccactggaggatctcaacaagggactgcaggagttgaaagtgaatgtagcgtttctcttcccccgcttttaaaatatttaattttcaggaaaatttcaggaacaaataacattttttcatctcaacaagaccaaattgcctctatggactatatggcggctctgctctgcattttccataaagtgatatgtgctctccagtggagtcgcatcctgttgtaggttaggttcccagggagcattcacggagttggagtttagcttgcaggattttactagggatccctgctgaaggggagtggccctggggaagtggaactgcaacacaggcctgacacagcctctgccagtcacttgggtcatcatggagtatataccgtccctcagagcccagtcctgtgctgggctgaaagggtaggacctttatacaaaccctgccaccaccagtgggtggatatgggccacttggaagagggcttctccttgggcaagggagctcttttcagctgaggtggaccctgaaggaggtgacagctgcaggctgtctcccaacagcattccccatcactgaggtagagttctgccttgagcaggggctctaagtggtggatctttgcttccattatgacactttcattttcattgccaatgtgagtctactcattggcaagtgctttctcctaactcagcctcttgtttacttggattcaagataaacggcatttacaagattgcacaaaaagagagattctcaactgtctggtatccttttactgtagctctaggcagaggcaaaggtgtaatattgatagtctctttggagcatgtaataaaaagcatgcctggcattttaggagatacatgaacaatttgttttatcctcatgatatctttcaagtggcaccagttggcttttttctggagccggagtccaaagctaaaggccacaatgcagtgaytgaaatctccagttacatttttcttgccagttgtctttagagaaatctttcagtgattaagattccagatttaactcccttttccttagtccttccatcaygaaactaaagctgtcttccagttcactccagcatggacattaaactgtaccccactaacttacatcttgtaacccaagctgatgacaagagctgggttggcttgccttttagggtttgttactgttgcatcccattgatgccctgagctggcattggccggtgactgtctcacctgcaggatttgcaaaacctgtctccatttcccttctttcaggttggaaagcttatccaagaagcagctggaagaagtaatttgaagagagtaactctggaacttggaggcaaaagtcctaatattatttttgctgatgctgactgtaagtcaactacaggtcccatacatgaaccaccacacaccctttggtgctctcttttatatctccacttttgatrggacactagcaaaagatatttgaagctaagggcaatcaaaaagatctcctctaaggagaaaatggtttaataatggggaaagagcacttttcagttgacgactgaaccagttgttttctagacactaatgagccattttgaatctgtgatgttgtagaatagggggatgagatgaaggcttggtcagtggcatatggttcaacagcagtggtctcagctgctgagcacctgaaggatagtctctctgcctagattcaataaatctgtaacttttcaactgtgcctggtggctggtagaccattttaaataaatccgacttgaccagccctgccagcattttccaaacccacagccccttctctgtttagtcaattccagcccctttctgttgctcgcatgactttcagttaggatgacagcacacgtgggtcagttcggtatgagtagtcctaaagctgggatgattccacttgccagtaggaccttacagaggcttagagmagtaactgagaaaccccatgtctctaggaaggatgccacctaggccattctgcacaggtgtgacgtttctgtttgaaaagctctccaggtaaggaaatcccaccatctcattcagtgattcttttttttttttccctccacttgtygccaggcagagctgctttcccagtctcaccaccagagagatcagaaaaccaaaagcagattgcttgaatttcagcmccagcttggaatttgcagagttcagctttagctttatattagttgtcaagaaaatcagaatccttatgcctgttcctcttgaggagtaggaacttcatctccctaacattgactgattcatttattcagtcagtcggtcatttagcaactaatgcacgtcagattaagctgttttgaagtgtaagatataagggatgaatatggaagagttatcataggattttacacaagtccatgtcaatctagaggaaatttagtgtcttcaaagaagacccattggtgttacggtttaatcccccaagtaccaaacatacagccccaaggccctgtagatttaggagttgtaaattggccaaatacaaaatatagacatgtttacctgtctaaacattacactatgttcaaaacaagaactgcacattaaaatattgatttctgtgaaaattgagargatctggcaacctggggctcatatttatgcatggcaatgattaaatgtagtggctttccttcttagcccctccattacattgctttaccacctggcagactcatacctgtaccttatctcccaagccctgtggtatataggggtttgagactcctgttatacacgaggttcagtacctctgtttgcagaataagaaagagacccaaagaagtgaagttgttcaagttcacatagcatgtcagggtgtagttagaactagttgcattcccaatccagggctattcatggttatgtcatgcagtgagcacactatacctagggctttggagaggggagggaggcggcttcatagacaggcccctccccaggcaaagcggtgagaacatggctgtttcctcttgtagtggactatgctgtggagcaggcccaccagggtgtgttcttcaatcaaggtcagtgctgcactgcaggctctcgcatcttcgtggaggagtccatctatgaggagtttgtgagaagaagcgtggagcgggccaagaggcgcgtagtggggagtccctttgaccccaccactgagcagggtccccaggtagaaaaatcataaccattccctttgtttacttaatccttgactggcacagaactgtgtacactgtagtaggtcccagcaaagcgacatcttccttttcggctgactcctttattctccaccatgtcttcgtggctggaaatggagccagagagggattgcttatttcttatgcttctctgtccctttctaagttttatctctgaaaaactatgggattaccattactttaagaatattctggccgggcgcagtggctcacgcctgtaatctcagcttttagggaggccgaggcgggcggatcatgaggtcaggagatcgagaccatcctggctaatatggtgaaacccygtctctactaaaaatacaaaaaaaaaattagccgggcgaggtggcgggtacctgtaatcccagctactcgggaggctgaggtaggagaatggcgtgaacccgggagatggagcttacagactgtgccactgcactccaccagcctgggcgaaagagcaagactccgtctcaaaaaaaaaaaaaaaagaatattctgacctttgggactaagctggagtctctcagttctaaagaaagccatgagtatgacaagatgggtctggacactagaacccagtcccagtccttccaatcactgaactttaggacatccctacagatgccacagtcaaggagggtagatatctttctttcctagagccatctatccttttacgagctgccaaggagtctctccagcagcctgaaccagtctggacagatcccttgtagcttgtgaaagtgtaggaagtgaagggctggctcacttcccttttgctgtatggttatttcttaatctgaaggcctcgtgtactttagtggggtggggagggccacaaagtctctcctgaacagcctcctctgcaggttcaccgtaatcatcgaggcatatttctaaagggaattctggttttaatctgtagacaggttctgagaattttcagaaggaacctggaccagctcttatatgggtcactaaagcatgggtttagggattattcaagagaagattgatgttctggctgagccattcaaacttgggtaaatgtaggtttttgtgttatttaccataataagcaaatgataactccgtcagttttttgggggaagactgaccttgtttttttttggactaggaagctcatccttcactctttactgttaatattttcctctaaagttcctctaaaagtgtaataggaattcctttaaaaacaaaccacaataagattgggtatgtagcactatctaaaaaggctgtgtgctaatttttgcctctttttactrtcaatacaacttgctaagttactcatttaattataaaagtcaattttccctcatatgaacattgaatagtaaattagccagtgtctccatcattttgaaacatttttctaaatgttcagctggtacttctgattaggcaatatcatcagagcagtacatttattggaatcgtcgatatattaggattaaccatacaaaattgccagttttttgtaggtcaaaaattggtaagtaacagcagttttatatgatctgactgggtgtagttaaactttgaaaaaaaccctaaaatgaaagattctcaagaacatacttatttccattttcatagaaggttatatttggagtcattaagtcttgtctcccacagattgataagaaacagtacaacaagatcttggaactcatccagagtggtgtggctgagggcgccaagctggaatgtggaggcaaaggactgggccgaaaggggtttttcattgagcccacagtgttttccaacgtcactgatgatatgcggattgccaaggaggaggtatcaaatatgctgttcttacaaaagccacatctttcttgggatcatttctagagcatttctagtggatgatattagagttttagctctttatattttacatatattcattttgcaacagtaatgaacatggctatgaaaattccagtttcaagaagaaaaataaaccaaaagacaagcaagctaggtggaggccaggtgacatgctatgtgcttatgattattattagccaacagaacaatcagaatagcctgccattggcctcaacaatacactggcaatagttcggctctcctaaatgtgggtcactgggatgttaaccaggagagagaatccactgaagcatctttacatctgtgcaagagagggacaaggagcaaatcagcccacagtccagagcattccgttctggagcagygtttgcaggatcacggaggatgccacttgctcttctgtacctaaagaagacacccctagtatacacagtggaatcaagtgatgctggagaggttggggaagttggggaggttaaacactaatgtcagactcttcttgcataatcttatcctaggaaaggttgggagattttacagttttgtactgctaaacttaaaggtcatttaagtaatcaaggcagagtaaacttgcattgaaatgtggaaagcaggtaaaggaatgacagagcaaccatgttgagtcatattatctttttgcagatmtttggccctgttcaggaaattttgagatttaagacgatggatgaagttatcgaaagagccaataactcagactttggactcgtagcagctgtctttactaatgacatcaacaaggccctcacagtgtcttctgcaatgcaagctgggactgtttggtaagatcagagtcagtcttgtaacaaattccactggtggtatagggaccagggtgaaataaacangtatctccttggaaggatggggaataccaaaagcaacyaaagttcaccagaaaaggggtacactccttactgcttagatccagaaatcaaagtagattttaaattacaattttttcctctggaggaaaggaatttaaaaataaaacttctaaaagaaataccntgccagtcagattatrtgctcagacttcacacgaactcacagtnctatgttttcttctttcaggatcaattgttacaatgccttaaatgcccagagcccctttgggggattcaagatgtctggaaatgggagagaaatgtaagtcttaaagttgctgatgcctgcagagaaatagattgcaaatatcagcacagagcagtacttaaaaaatagtttaattatcttacactcatccatacattcaacaaacatttcgtggagcacatgctactataagctaagttctattacatgttatagagatgaataaaacacaattccatttcccaaagtgagaatggaaaaaattaatgtaccattaattccctgtagtaaaggctatgattagaagtatgttaaacattttgtcagtacagagaaaaatcaattaattttgactgctcgggtcctagaagacttcacaaaggaagtaaccgtttttcctggaagtaacatccaggaaaagaacccactttccctccttttgaaagaaactgatctgtatttgccaaatgctgtgactcacagaggaaacatgtttcatgcccgttccctcagccattactgaatgcctatttttttgagcaaatgcctagttcacaatctaacaaatattgagcataaatatgtacaaagcactgtgcttggtctatggaggaagatgcaggtccttaaggcatttaatatgttttggggtaaataaaactaataacattgaaagaatcagaggaatcgcagaaaagactgtaaaccaatggaggagctcagggatagggaagatcactgtgarctggaaaaatctgggaaacctttagatatgatctgctacagggatttgtgtcagcctttcaagaagaggaatgcttggatagagaagggggaatatattttcaagtttgtcgggcaaaacagggtagcagtgggggagagtgagtaaaggtattgcgggaaaaataacggtagtgtgtgtttgtgggagaaatgcagtgaaccaacaagactagagcagaggatttacatacttcagatagtttcactggtaatttcaagctcccaagcaaaactataaagtaggtatagcttggagattagagcagtttctagaatcacactgctcggatttgaatcctgccactattactacctgtgcaaccttggacaaattacttaatctaagcctcagttacctcatctccaagatgggaataattatactacctacctcagggttcttgtgaggattaagtgtaaggattaagtatgcaaacatccaacagaatrtctggcaagccttcagaaaatgttagctgcaatcatcattattcatcaagcagattagtgttatatagatgattcctctttttcttaacctgtaactttggcggaagtttccccaaattccagctggtgtcaccaacttctgttctgacagccagaacctataaccaatctgggtcatatttgttcagttcttagtattccttcagcttttacagagtcttcatgcactccaggtatgtcttcatttgcttttgaccttcaccttctgcttccacttttcaagatgcattccgcttcttatttcatttccttcctctatgtctgtgctctcccagtctctgaaatgctggggtcagtcactggctctgggaatgctgcttgcattgattgttttgttacagatcattaacagggtgaatcatgagcataaaatatactttcaataaatgatcgctggttgatggaccctaatcccaggctaatccatggtccctcattgtgggcacacttgttacattagctgagtctagtctattcccatcagaaatgttctccttgcccagaaaggtggtccaggagacagtttggctctatctgaacctcatataacagtgctcaagagaccgaagaaccatttctctctacttgtcttccaggccctatggtgattggaccttctcagtgcagttaaaaaataattaggaaatgctgttctttgatgagacccactgcatcttgtctagattgcatgyttgtttgtttgtttgtctctacttacccccaaaacatgttttctctttcttaaatgaccctgagtgacagaaaatgcttcaaataaaagaagctgctctgtcttggtccccaactcttccacctcatttgatacagcctcagaaactccacttaatcctccgtctacacagaattatttatctcatggcctgcaaactccatgcagctttggtccctgacacctccctgtctatccctaagaggagcagagacrtgaagtggcacttccagaaacatctggaaactcccaggagggctgacctagcccacgaggtctccccacagagagctgtggggagggctgccctcttaattcccaggctcagagacgagcttttctcaggtcctcctgcccacctatttctgcctgtttcacttttcctgtcctttttcttacttccttatcaaactcccctgagatgaggggtggcaaagcacaagccataaaatgtcacaaactgaggagatggaaagaattctgtgaacctcagcattttaaaaactcaggacactggctttgaaaatgagaagcattgttagatactctaaatcagagcttgtcaaatttatgtgtgtgtgtgcgtgcgtgtacacgcatgcatacagagaagtcacctccagtctgggtgatggttttgttaagcatgcgtatctagggacccactctcagagattctgagttagttgatctgcgataggacccaggaactgcgtttttaacaagcttccagagtgactccagtatacmtcactgcccaggacccacagagaagcacctccgttccagcagggttttacattgcatcacacacccaaacactgggatccaccagtcacccttgaaagcaacctgccttccggtgacccgctcccacccaccctctcagtcctgaccacctgcaagctcctctgatgctgatggtctggagactttactccgctctgaaaaatgctgctgcaagtcaagtaaaagagcaggaaaatatataccctaaacagaaactcttacttgttttatgagcaagtctgagtgagtcctaaaatggctggcgaagagctaccaatactgactgacaggttaccttaaagcctctaggtgtgccaagtttgatttatcttagggactagaacctagtcttctaaatgtgattttgccttgmtgtttcgtcctgatgtgaaggtaaccacacagagagattgggctgcatcagtaatgatatgcatacctttcgtgcatcagtgagcttcttccctgttaactgtatgtgccacaaaatttagctggagtaaataaatatgcgacagaaatcctggaacaagatggtgaaattgcttaagaatcgagacttcagggctcaatgacctctgagcatgtttcccaaagtgtgacccacatgaccatctgtctctcagtctcctggtccctccgtagagcttctgaaactgaatctttgtggggtgggggtagcgttcaagaatcaaaagttgaaccaagctctttgggtgatacttatgtatactgaggttcaggaactgctggagagatgactgggcaccaagaggatgacagtgactcagctggcatcccttagctggttcatggcagagctgagtggscactcctgtctctgaccccagcttcagtgctctttatctcctccatgcctcctcagtcgtgctgctctaagactgcttactggctttccttcatgtcctgggcacagagcagttcttttggtagcagatttgagtccacttcccccgtgcacagatcactgctcaggacccagagaggagcagctctgctccagcagggttttccattgcatcacacacccaaacggtaggatccaacagtcacacttgaaagcaaccataatygtgaggtttytgatgctgtagacttccttacatttctcacaacctagttagagagtcacatgggggtgaagtgtggctcgcgacctgccccaacaagtgcgtgcagaagccaggaaacaaaggagtaaattcacttcaaatgggatgcacatggtgtccgtgatgaagagacacattcagaattgcccaaggacaggaaaatgaccagagagagccagagctgagctggtaataaagagactccgagactgagtggagttaatgagggaagcatgcaacgagtggggcaatttcagttggtttctctcattgctttaagcgaaatgaacyatacggacaggagaacagcctgcttgccccagtctctccttggccgccctctgttgtccctgtcaactcaggtgcccacggtgctcagaggaggtgctggcaaagcccctggagccttatgtaggccatgggggctcctaaaaggaacctgaatgaatcatttacagcaggtctctcttgtaaagcccagccacagtaactcgtacactgactgtttcaaaagacagcctttcttaatcatttaattgtttcatattcaaatatatctcctaattgtttttattttttcctgatctagaagatatgacaacagggtagaacttgggaagagggaataggaagctcgcccttcctccttccctcctcccctctctactttccttccttccttggtcatcaggtaccttctktgtgcctgctgttgtaggctataccctatgtttggtggaaggcaaaaagaaaaatcagtaggatacaactcagtagggaagacagagatattcaagccccttgtcctcccagtgtgataagtgtggtggttgaggtgtgaacaaggggctctgtgaacagagaggacgaaagaggagctcctcctgaggctgttgggaaaagcatcactgaagagtgactttcagaagaagagaagaaaaagaggagaacatgcgtgattttataatgaaatagattagataagrggaaaaaaggcatttaaacaaggcaaaaagaacaggagaatagagaagagatgtggaggagaaggagcactgtagtaaacacgcagaaggacaggaacacttagacatgcracccactcccaccctccgtcttgggggaggaaagcacactactgtcccaaagaactaatactgaaccagtgctgccttgtggagagaggcatggccaaggcgttcagagacctgggcctggtcccaccgctgcccacagcactcagcctctgagcacagcctggggtcatctgtgtgccctctggccaaggctgayggtagttctctgagtaattgagagtcattgcctgtctgtgcagtattgtgaaaacaagtcaccttttaactttaaaactactttaaaaaactttaaagttttaaaaaaacttctttaaaaactactcatgagatgacagtttctctgaccctcagaggaaggctgggctgcgcatacgtgaggaatttttacatgaacatcccaggacttgctgttcscaggtgataaactgcacctccccaggactcccgctgcactcacatgcagctccctggacttctggtatctgacccggcccatttctgtgtttcaggggagaatttggcttgcgggagtactcagaagttaagacggtgacagtaaagatcccccagaagaactcctaagaaggccaagaaggaggatgaagcccagcctgcacgtctgtccctctctgctttctctgtagggcccagctctcaggaatacaaagttgagccacggtccttacttaaagattgaaaagataacatgtaggccaggcaggtcactgcacaactaaagcaaaccagctgggtacagtttcttggcactctgtaaggggccaccttaatcataccaaatattggggaaagtgggataaagggaggaggaggagctagcagacacatccagtatctccttctggagcacaggatgaaataagggagctgtattatttcatgtctttgtcacaaagaactttcctctcaaggaaaggtgacctttctcctgtcttcattttcctccttccaggccctcctcgctcacccacccctccctctcttccaaggagatgtcagctgagctcattctggggcagatgtttgggccgggaacaattttccaaggttgtaaagccaaattatcatttcatgttatccatttcttcaaagcaaaacatgaaatggttttagctagagtcagaccagaatgaaaatgccaggagctggtacactasagatgtagtaagaacctgggatattcctgacccaatctggttttcttttacccataaataacatgaatgaaaaaagattgggacaatagagactggaagtcatcatgtgcagttcaccgcttctgagcttgctgcagttttggggtgtgtgtgtattagattccttctcagttattctggaataaggcaaggagtgggtkgtttttcatagctagataagatcttttccaaagtttttcttagaaccaaccaaaaaacaatccgagtaggcccaagaatttgataatgctggatgccttgcagacatcattcagtttctaatattgggcaacaattattattaaatgaattatttctgtagttggaatctgtaccttctgaacctctacaccaataactgctgcaggtgtgattttggtctgtcacactgtacatctatcataatgtgccctgtatctattggcagtgaccttggaaaatctggccaagcctaggggtttccttttccatttgccaagttccattgtgccaggactgccgtgctccactgagctcctctgtcacaccccattcttgcccctcactgggcaggccatggcctacagcttgcagggagtaaagcaggcccgcctccctttcttcccatccacatactcctcttctgctttccagtgactccaccagtttgatgtgggaagtgttagcttcctttccttcttccatcccttcttccatctttccagctgtcaaatccaatccagtctctaacctaratgcagatcatttatttaaaagtaccaaacataacccagagtwtgtggaatatgggcaacatatatatagccttctgtatttaacgatcttctgcttcttaaccgtaccagttttctatttataactcttatctatccatgatgttttaaagtctccacttgctgttatttacaaacgacagtgcattcagcagcccagtgccgtgagccctgacagatgccgtatttctgagtgcttccatgtgaatgctgccctcctgtagcatgtgtccaagtggacatagccactaaccaactagttacctttggactgcaacaaaaaatgtgaaaatgaagatttatttcttttaatttacttaaaaagaaacctctgtgctagcaataaagcatttatattgtgtactccttgggattgtttggctgtgtctgtaagtctttgggtcatactgagtctctttgggtccttcctcagctgctgggtttttcagctgtgttgccctcttgggtaactgagcagaagcctgcaagggtatttttacagaattcattaaggcaactggtaaatggtattaaggtaaacaaaaaccttattttctgatgctatttaaaatctgtgtgcatgtgtagtttagctggcatgtaagtataaccatatatgaaatatatgaaataacaagtttcctttagaatagcctccatgaaaactaaaatgcagagcagtctatagggtctgttttcacaaacgtggactacccgccgtgagctcacattgctgatggcatttcacagtagctttatttttacttacttaccaaagtgaaatgaagtcagaggctgataacctgatggaatatttttgcagctgtaaaaagaaatcygtaaatggtgaccgtactactaccaagattgagcttgttttctctcagtgtgttctcagagttgcgcttttgaggagtggttcccaccctttagaaccgcacagctccccacctttccttccagcccttggaatctccacccaagttccgatcaagtgagacaaaagctaaacctaatgaattagccccagagcagatctcgcttgggggacaagaagcattgctgtggactggggttcactgctctgtttgccagtagcttattttttagaggaacagaaggagcatgggagaatgcagcccctgcagcaccagatggaactgaaatataagatgcgggactccctgacaatccacctcatgttctgtccattgagccatcaggaaaaaaatgagaaaggcctggacatgaagtaatcatttgaaagtcttttagaaaggtgccattgttgcacgtatagatagcaggaatctggagtcagatagacatgcgaaaacatttctgatgaataacctacaaaggcagagaggagaggccaagctcggcatatttatgtgacagtgaagagatgggctggcaagagcaggcactgcatgctggcaactagtcagactacagagggtcttaggtcagccagagctgttccctagtaatgtaatagaaaacagagacactcgtgggctttgagttggagtgtaatggaagcagtggttggagtatactggtctggagcaaagcggatgaaaagagactgattacagagtttgtttgccataaaactatggatggcataatgctaggggggatggagaggaagggaacaaatcaatggagaagttactggaacttaaggaatgaatatgatgatagaatggaaaaagtttattaaccagggaaggtaggaaaatggtaatgcccctgccaaagaagctacaacatgaaatgcagttgtggggagagatcttgacttcaggcttttgacacgtgaattgtggggttatgaagggacatccagatagaaatctcaagcaggcaattgcagatgggagattcggacttggctcaggtggaccagattctcacatgaacataaaagtgatggctgcagatccagagagggtgaaaataaaaccaaaaccaaggccagggagaaaaagcccagcaaaagaaatggaggctgtagtcagagaaataggagggaagctctacaggtgttaacaccccagaaacaaggcagagaagtcaaggagcacaggcagcaaggggttgagaagtagagggtggtgtgtggagcccgtgcattaggggcttttgatctctgtcttgatgaagtagaagctgatggtgtgcattagctgggaggggtgatggcagtaccctgctctaagctgtgagccatgtagcctcccccgtgcctgaggacagcccctgcagtggcaggccctcatcctgagccgtcccacagactcccccaccaccaggcaggacatatggaatgcctgctctcttttgctctccacccaatgctcttgctcacccagaactcaaatagagagggcaggagctcacggttgataacggcctcatgagttaaaagaaacgagagcttagagtagctggggcaggaggaaactggtctcagaatacatgttaaagagtgagtagatttagaaaggtgtgaaaaggaggaatacaagatggctaggggaaaaaaatctcaatgcagactttgctagtcctgtattggcaacattcttggcagggaaggagggaaggggcagccaaaacagaaatgcccactgccacttatatgtatttatatagtcatttatttgtttttagtttttcttttggttgactaataattcagaaatattaaaatcggtcacaagaatgcttaaaaggtaagaacaaaaataaaaacaaagtcccatgaattaaaaattagagttttaaaaaaatgaagatgggaaactaatgaaatcagaatggggctagaaaaatacatatgacacagtcttaccatgctgcttctgtggccctgctgcctcatgagggaatgctgacactgcatacctggtggtcctaagaaatgaacctcccttccaccctccctctctcccttcttccttccctccctccacaaatgtttattctgctagtcactggcacaggtgctggrgatacaaagcaagccacacatggctactacccttgtaaatcacacagtctaaggtcactcataaccaagagtcagcaggttcccttgccatctcactctacctccttcccacgcacagacactggaggtacggaagggtaacgtggtaccattcccaggtctgcttagtgggtaatccagactgacaactttgcctggggcgtcagcagattagcggtgtggcagagtgaaatttcagcacgttgcatcagagggtgagaagtgtaatcagaagtcctcactcagcgtctcttagcaatcacttacaaggtgtatgtcttaacttccacgggcctccacttcctcctctgtaggatcaagaggatcattcctgtgctacctgcttcacagaggtgtgtggggattaagcaacatggtggatgatatttcttcagttggtctgagacatgatatacacacgcaactccaaacaactacagaaagcaaaagcagtctgctctttgacatttgctaatcagtctgcaagacatcagaattcacttctcacccagcgttgaggccttcatatagaccctgactctaggatagtttcctacgggtttccagtggggcttccttgcctggaggccagaactcatctgaatacctcaagccagctaggggccagagggatgcatgcagctgtgactttcttccaagtttcagtctcctgtacattcaacacattgttcagaccctctgtagagtgataatctgagccgtagccctgaccacactgtctgtgccacccagaatgtcttatacagcaactgctcatccgtgggaccagcggggagtgagagcatgggaaagtccactctggaatggcgtgaagccctcttcctaaacaggtacactgcctaattttcacttggttattggccagcataaaaggatgaccatcttgccatttagcctttaatgtgaaactgctgggataatgtttcctttggccatttatctatgtagcaaggaggaacctgaaaccagcacagcctgcccccgttcctgctggagcatgcacacctcttaatggtttcaaggtcttttgggcttgcctttttttttttgttttttgtttctctagagcagtccctgtccttctcctcaagaaatagatgttatcaagtctgttgagttgcccaatttcttctacaacatggtttccccagtgacttttcagaaaggtacctctggtttcctattttacagtctaggcaggataaaatcaaactaactcaagcaatcctaagctggaaagagaagagacccctcctaccccacctgcagccatatgtggggattctaggaccctgtgaagacctctttctctctaatcccaggcagttacatccattttatgaaccaataatgtagtgcctttctccagtttctcttggttggaaatttaaagtgacagctttcaagaccaccactgggggtagatgagtagcaaggaacaagaacctatagtgctcgctggctggccagagcttgcacacccaaggggaaggtctgtttgttaaacagtggaggcctcagtctccatttcccgagttaggt

SEQ ID NO: 93947 - DNA, 13045 bp, Homo sapiens
taactttttaaagtgacaattgacattgcatttttatttagccttaccctatttcctattctttcagcagttttctgctgctgagctcagaatggcctgctgagcttccagtgattgcctgatggcagctgtggggttttccaagctctcacagtatcaggagtacctctaacttctttctacttcctcccacatcatttctgatactacacagatcttgtagcttttgctcctacctggtagcatgtaggtgtacatggggatatcgtatcacctagtcatgatgtaaatacctttcatggggttttggccttgctattctggttactctattggggagtggtgttctggtaggttcaacgactgtatgactgctgccatctttccaaaatcttctacatatctccctatgtcttcaattgtcacatgtccttattttttatgtacattatttaaaactttctatgaataccgctgtctattttaggctatttgattttattctctggatggctaactgatcactgaagattcatgttcccttttcataatatggaattgttgatgaatatggcttcttaaccaggggccacatttaccagctctcttgccttaaaaaggggccatgtgatgacttctggccaatagaatgtgaacaaaaatgatctgtgtcactttatgggccttggtggctgagtatcttacatgctcatgttctcttccccaagacttcacactttcatttcagacgacctcacgggtcctcttcccctttagcaggaactatgtatggcttgcatcaaggacagcagtatcataaaacgaaaataatttggatcactctatgagttaggacgccagcagtaaatagctggggcacccaaaaaataagacagtttaaagaaggaactattgaaatgagtgggcaaagtgacaggatttaacagaggatggtgaaaaacccagggccaggaacagtaggaaggtgttatcacacccaagtctggaaggagaaggggagggattcacatacatgtcacctagtaagagctgtagccatgggagagtggccacagatagagaaatgagccatgagtgaaacaacaaagacctgagtgggtctcttctctcacctccagtctcctattagtgcctccctttggcaaaacccactggaagctacaggcaaaggagtttatgtgatgcagtccatagaggtgatagaacagagaggggaaggcagagaaggggcgaatagacaacatccaacagactccctgagtcactgcctagaggagggctgtcaaggaaagtagcctgaccagtaacaccagcattagtcttagtgtgtgtaaagtgttacctgctaagcctctaagacttagagattgtttgttccaaaagttaacctgccttaaatataactggtctatttagattttcgcattatcctttttgtatccaaattggttttccaaaaactatcaggggaaataaataataatcccctaaaaacgtaaatatgtgaattttagcaagattgtttagataaattgttaataattctactttgaaattgtagctacttattctgcctgtagatatttgaaagagctgctgtttacaatggcagctcaaaagtgagggcactgtgtgtgggagatcggagtagggggaatgagaaaagtcttttttattcaaaaatgcaaacataaggagtagaaaatattatgggaaaataattaaatgaatatgatggaaaaacttttcaagacttcactcttccatttcaactggcctccttctttttagtccactctccatcctctttcctcaatggaaatgcctgttactctgaagctagcccctactatcttgaaaacaggttctttacaccttcctccatccctgctgtgctccagacccgaagcctttcttcctcatcttatgttgacacattgtccctatgccttgctacatgagtggttagctatttttataactttattcatcatctattaaaaagattgggtaccacctaggcaacaccattttgaacataggaacggacaaaaattttatgacaaagatgccaaaagcaattgcagcaaaaggaaaaattgacaaatgagatttaattaaactaaagagcttctgcacagcaaacgaaactatcaatagaataaacagaaaacctgcagaatgagagaaaagttttgcaaactatgcatccaacaaaggtctaatatccagcatcttacaaggaactgaaacaaatttacaagaaaaaaaaacaaaaacaaccccattaaaaagtgggcaggtgacatgaatagacacttttatttatttatttatttatttatttatttatttattattttttgagatggagtttcgctcttcttgcccaggctggagtgcaatggcatggtcttggctcactgcaacctccacctcccaggttcaagcgattcttctgtctcagcctcccaagtagctgggattacaggtgcccaccaccattcccagctaatttttgtatatttagtagagacagggtttcaccatgttgccaggctggtctcgaactcctgacctcaggaaatccactcgcctcggcctcccaaactgctggggattacaggcgtgagccatcacaccccgcctaacagacacttttcaaaagaagacatacatgtggccaacaagcatatgaaaacaagttcaacatcactgatcattacagaaatgcaaatcgaaaccacaatgagttacaatctcacaccagtcagaatggctatcattaaaaaaaggccaggcatggtggcttacgcctgtaatcccagcactttgggaggctgagatgggtggatcacctgaagccaggagttcgagacccgcctgaccaacgtggtgaaaccccatctctactaaaaatacaaaaattagccggatgtggtagtgggcgcctgtagtcccagctactcaggaggctgaggcaggagaatggcttgaacccgggaggcagagattgcagtgacctgagatcacgtcattgcactccagcctgggcgacagagtgagactgtctcaaaaaaaaaaaaaaaaaaaaaaaaagtcaaaaaattaacaaatcctcatcctgaaaccaaaacctggcagagatacaaaaaagaaaaagaaaactttaaccccaaatccttggtgaacactgatgcaaaaatcctcaacaaaatactggcaaactgaaattagcagcacatgaaaaagcttatccaccatgatcaagtaggctttaaccctgagatgcaaggttagttcaacaaacacaaatcaataaatatgattcatcacataaacagaactgaagacaaaaaccacatgattatcccaataaatgcaaaaaaaaggcttttggtaaaattcaacatggcttcatgtttaaaactctctgtaaaataagtactgaaggagcatacctcaaaataataagagccatctatgacaaacccacagccaacatcacactgaatgggcaaaagctagaaccattccccttgagaactcgcacaaggtaaggatgtcctcctattcaacataatattggaagttctgtccagggcaatcagggaagaaaataaaataaaggcatccaggtaggaagagaggaagtcaaactatccctgtttgcagatgacatgatcctatgtctagaaaaccctgtagtctcacccaaagcctcttaagctgatagacaacttcagcgaagtctcagaatacaaaatcaatgtgtaaaaattactagcattcctatacaccaacaacagtcaagccgggagccaaattagggacacaatcccattcacagctgccacaaaaagaataaaatacctaggaatacagctaactagggcgggaaaagatctctacaaggagaactccaaaacattctcaaataaattagagattaacacaaacaaatggaaaagcatttcatactcatgaatagaaagaatcaatataaaaatggccatactgcacaaagcaatttatagattcactgctatttctattaaactaccactgggattcttcacaggactggaaaaaacttttaaaattcatatggggctgggcacggtggctcatgcctgtgatcacagcactttgggaggccgaggcagaaggatcacttgaggtcagaagttagagaccagcttggccaacatgatgaaaccctgtctctactaaaatacaaaaattagctgagtgtggtagtgggcgactgtaattccagctacttgggaggctgaggcaggagaatcacttgaacccaagaggcggaggttgcagtgagctgagacggcggtgagctgagatcacaccactgcactccagctagggcaacagagtgagactccgtctcaaaaaaaaaaaaaaaaaaaaaaaatcatatggaaccaaaaaaagagcccaaataaccaaggcaatcctaaacaaaaagaacaaaggtggaggcatcacactacctgacttgaaactatgccacaacagggctacagtaatcaaaatagcatggaattggtacaaaaacagatacatagaccaatggaacagaatagagaacccagaaataaggctgcacacctacaactatctgatcttcaacaaaccagacaaaaacaagcaatgggggaaggattccctattcaataaatggtgctgggattaactggctagccatatgcataagattgaaacgggatcccttccttataccataaataaaaattaacccgagatggattaaagacttaaatgtaaaacccaaaactgtaaaaaccctagaagacaatctaggcaataccactcaggacataggcataggcaaagatttcattatgaagatgcctaaagcaattgtaacaaaagtaaaaattgacaaatgggatctaattaaaccacagagcttcttcacagcaaaggaaactgtcaacagagtaagcagacaacctacagaatgtgagaacatttttgcaaactatgcatttcacaaaggtctattattaagcatctataaggaacttaaacaaatttacaagaaaaagacaaacaaccccattaaaaagtggggaaagtacatgaacagacatttttcaaaagaagctacatgcagccaacaaacgtgaaagaaaactcaacatcactgattagaaaaatgcaagtcaaaaccacaatgggataccatctcacaccaatcagaatagctactatttaaaagtcaaaaaataagagatgctggagaggtttagagaaaaaggaatgtttatacactgttggtgggagtgtaaattagttcagccattgtggaagacactgtggcaaatcctcaaagacctaaaaatagaaatgctatttgacccagcaatcccattactgggtatatacccaaaggaaaataagttgttctattataaagacacatgtattcatgtgttaattacacactatttacaatagcaaagacatggaattaacctaaaagtccatcaatgatagattggattaaaaaaaagtggtacaggctgactctcttttcagactcagcccgcctgcacccaggtgaaataaacggccatgttgctcatacaaagcctgtttggtggtctcttcacacagacatgcatgaaatttggtgccatgacttggatcaggggacctcccttgggagatcaatcccatgtcctcctgttctttgctccatgaaaatgatccacttacaacctcaggtcctcagacccaccagcccaaggaacatctcaccaattttaaatctgactcagccggcctgcacccatgtgaaagaaacagctttattgctcacacaaagcctgtttggtggtctcttcacacggacgcacatgaaaactggagtcctcacgcccaccagcccagagtgctctctagaggaagcctacagacacttcctggctcactcctccagacgttagctgtcttgctgaaactccttttttcacccttgaaaaccactgcaagaatggccaagaacccagctatcctgaggctgtgaccatctatgacaagccggcatctttctttcaagagacacctctggacctgcagcaccgactcttcatgaagctgggcagcacgcactctccgttcagggcccgctcagaacctgaggacccagccaggagcggtcggccttcatgaagcgggatgctgggagcgggctggtgatgcgtctccatgagcggccagccctgctggtcagcagcacaggctggacaggtctgcacgacccatggaacacttgagaggacgaagacttctccatcctgctggcagctttagaaaagtttgagcaactgactcttgacgaacacaaccttccttctctcgtctgtgtgataacaggcaaatggcctctgagggagtattacagccacctcatccaccagaagcatttccagcacatccaggtctgcaccccctggctggaggccgaggactaccccctgcttctagggtcggtggacctgggtgtctgtctgcacacgtcctccagtggcctggacctgcccatgaaggtggtggacatgttygggtgctgtttgcctgtgtgtgcygtgaacttcaagtgtttacatgagctggtgaaacatgaagaaaacagcttggtctttgaggactcagaggaactggcagctcagctgcagatgcttttctcaaactttcctgatcctgarggcaagctaaaccagttccggaagaacctgcgggagtcgcagcagctccgatgggatgagagctgggtgcagactgtgcttcctttggttatggacacataaatcctgggccagagactaaaaccccaggacccctgctgtccttcccgcagcttcttctcggagtctcagggcaaaccctttcgagcagcgcctcccagtggccagaagctgaaatgacagcagtggtgccgccgggtgaatgaattggttctgtgacccggggaaaagaaaaaaaaaaaaaaagtggtacatacacactgtggaatagtatgcagacctaaaaaagaacaagatcatgtcttttgcaggaacatgaatggagctggaggccattatcctcagcaaactgaaacaagaacagaaaaccaagtaatatatgttctcgcttataagtgggaataaatgatgagaatacatggacatatagagcggaacaacacacactagggcctgttggagagtgaagggtaggaggagtgagaggatcaggaaaaataactaatgggtactaggcttaatacctgggtgacaaaataatctgtgcaacaaacccccatgacacaagtttacctatataacaaacctacacatgtacccctgaacttaaaatttaataaaataaaataacagatgctggcaaagttgcagagaaaaggaaacacttatatactgttggtgggaatataagttagtttaagtattgcagaaagcagtgtagcaattccttgaagagctaaaaagaggactaccattcaactcagcaatcccattactgggtatatacccacaggaatataaatcattccataacaaagacacgtgcatgcgtatgtttactgcatcactactcacaacagcaaagacatggaatcaacctaaatgcccatcaatgatagactggataaagaaaatgtggtacatatataccactgactactacgtggccataaaaaaggactacatcatgtcttttgcaggaacatggatggagttggagaccattaaccttagcaaattaacacaggaacagaaaaccaaatactgcatgctcttacttacaagtgggagctaaatgatgagaactcatggacaaaaataagggaacaacagacactggggcctccttgaaggtggagggtgaaaggagggagaagagcagaaaaagtaactattgtgtactaggcttagtacctgggtgatgaaacaatctgtacaacaagcccctgcaacatgagtttacctatgtaacaaacctgcacgcatgcccctgaacctaaaagtttaaaaaaatttcatataaaaagattaggtgccaattaagtgcaagttatattctatatgtaaaggccacaaagaaagatggatagatgacagatagatgcatacctaaatagatttcaagttcccttcgtgaaataatttataatgtagaggtagacccaggagaggaaagtaaataagcctagtatgcggcagaaaatggtcagtgacatgaaagagtcacagataaagtcctacaatgcttcattttttaaaaaaggaagcgggaaacaaaaaacaaacaaaaacaatcccaaaacaaacagaagaggatgggaagctgacacttaccatgctccaagtagtaggttaggtggagtgcaaacgttagtcttcctttcatattgtgtcccgaattggtgggttcttggtctcactgacttcaagaatgaagccgcggaccctcgcagtgagtgttacagttcttaaaggcggcgtgtctggagtttgtttctcctgacattcggatgtgttcagagtttattccttctggtgggtttgtggtctcgctggctcaggagtgaagctgcagaccttagcggtgagtgttacgggctcttaaggcagcacgtctggagttgttcgttcctcccggtaggtttgcggtctcgctagcttcaggagtgaagctgcagatctttgcagtcgctgttatagctcaaaaaggcagtgttgacccaaagagtgagcagtagcaagattcattgcaaagagcaaatgagcaaagtgtccacagtgtagaaagcgaccccaacacattgccgctgctagctcaggcagcctgcttttattctcttacctggccccacccacatcctgctgattggtccattttacagaaagccgattggtctgtttcacacagagctgattggtccgttttgacagggtgctgattggtgcgcttacaatccctgagctagacacaaaagttctccacatccccaatagattagctagatacagagtgtggacacaaaggttctccaagtccccaccagagtagctagatacagagtgtcagttggtgcattcacaaaccctgagctagacacagggtgctgattggtgcattcacaaaccttgagctagacacagagtgccgattgttgtatttacaatcccttagctagacataaaggttctccaagtccccaccagactcaggcgcccagctggcttcactcagtggatctcccaccggggccgcaggtggagctgcctgctgtgcgccggcactcctcagcccttgggtggtcgatgggactgggcgccgtggagcagggggcagcacttgtcggggaggctcgggccacgcaggagcccacagtggggttggggaggctcaggcatggtgggctgcaggtccccagccctgccccgcagggaggcagctaaggcccagcgagaaatcaagcacagcagctgctggcccaggtgctaagcccctcactgccccggggcttgcaggccggctggccgctccgagtgccgggcccgccgagcccacgcccacccggaactcgcgctggcccacaagctccgcgcgcggccccggttcccgcccgcgcctctccctccacacctccccacaagctgtgggagcaggctccggccttggccagcccagaaagggactcccacagtgcagcggtgggctgaagggctcctcaagcacggccagagtgggcgccaaggccgaggaggcaccgagagcgagcgagggctgcagggctgccagcatgctgtcacctctcaatatggctagttctttcttgtccttctggaatttgttcaagtgacacctcacccaggaagccttccttgatcttaactcgccctgcctttcctctatgctgccacaatcacagctttatcacatcatagtgtaattggtttattgcctatcaccccaaaagatggcaagcacctggagatggggaacaatgtctcatctttgtgtatcttctatgtctaactttgagtctggtgtacatcaagcccttaaggagggaagggagaaagcagagagggaaaggaatgagggagggagagaggcaggaagggatgaagtgctattagagcattcgaggataaagggaacgatgtgactagtgtgaaatctaaaaaataagaggtgagtttcagaaattgcaggagtgctgttgaattgtgttaaaaggatatgggcaggaaggtggcaggtgacaactgttgaacatagaaaatggaaaagtgttttgagagttttgaatgtcagactatgacagctaaactcatgctgtagatagtggaaaaccactgggatttgatgagcagggaagagatgagatcagagcagagttttaaggatattaacctggcagtgggaatatcttatcctttttgaaagtatattcactttctatcaggaaatatctttgccttaatgcaaagaattaatctcatggggtgggtttgagcagccctggtaaacatctcgtttaccaaaagagctcaatcctgcatgtgtgtatgtcagccctgaataaagtatccttttttttttcaagcagttaatctttatactactccccaagccagcaactacataattttgatgcaacacctgaaactaattctgagctgctccccaaggcccagtatgtagttaccagcaagtgctcatccacagcagggagtgtcactagcaacttctaaatgagattctcttacaaagcaacatgtgccaatagagagtcattgtttgttcactagaaatgacttttacatgatgcattcatccaaagagaaaatatttttccatttatgggaaatattttaataagtaattaagtacaaagaataaaacaatactacaaattagaccatcatcctttgacaatcatatattattcattttaactgccataagccagtttctgtaacaatacatgagtaccaaatcaacaagtgataacttcaagctattttgatgaaaattgtatcttaaaattgtaaagttgtataagtaaatattaacgttaaacatgcaagttcagttgatattttgttttcaatgacatttattttctctaatttcccaaacctattgctgatcaaaaaaaaaaaaaaatccaaagaacacaagtctgacaagacagtattactaagccatgctaaatgaaaggagataatggagtctttgatattacccaaatggacttctggaattatctttttagagactatatgttcaataatcaacaactcaaaaaagaagaggattaccctgatattaaaatattttgaagataaaagtaaacaaagtcactagacatgagccatcttttagcttttgttaataatctcaaggtaaatcattgagaatactcaagctgaatgtatacctgaataagatattaactcacggattctcattttcctattgctccatactttgacaaagcattctttcttttccagtgttcctccttggatcaaatgaagggccaaagaaagcagtttccccattcttcatgctgtgatataggctctcctctaacaattctaagggctgtagaagtgctgggagatggatgtgtgaatagatgcttgcccagaaattcctgggactaccactggctcttcaataaagggatcattttaagctttgctgaaccttgaggtaaactcactatttaaattataggaagctcattccctttgcctggtctagaatgatcattcttttaaaaaaaatcagtaaataagttcccaacagacttgtcctgctaaactagtcatcacactttcactttctgctcccatgagcctccaggaatctctgcccagctttcttaactgaaattcacaagcatcaagttatcttgaagagagagttctttctgatcctgtcagacttctagagttaaatatacacatgcattttttatttatcggcatttctataaattttatttttccacacatgttcatatacacataaatgtatataggtcattttcaaagtttcatatctagaaaaagactgaaaatattttataacattttcacatggaaattaaattccaggtaactctacataatcagagggcaagtatctatcactcaatttatcctaaaagaatcttgcattgtaatactgctctaggtaaacatctgtttttttgctattcatgtcttcgctgtataatctacttaataattgctttgccaactcttaattccctttgtttttctttttcaagcagaaggatgttttaaaactcaggtactttaccacatattctcccccaggaaaatctgtagcagatagatttgtagacttgccttctctctgggagaaactttacttccatatgtgttcaagaaaaaaactgagttttgttgacatcacaattccttcaatattctctgtatgtcacagagtcctttgaaacatgaattatcttccaaaccccctgctccatgggctataattcttacctcaatcagagaaaagctgtgtatttcagagatacattaacagaatgtagaacaaaatgtctctcttggtccccactaagtgattttgttttaggtaaatttctagatcagacatccatgatataagaacgagaacattcacgagctaaattttttgtcttttttttttttaattgagatggtgtctctctctgtcacccaggctggagtgcagtggtgcgatctcggctcactgcaacttccacctcccaggtttaagtgatcctctcacctcagcctcctaagtatctgggactacagggatgcactgccactccttgctaatttttgtatttttagtagagacagggtttcaccatgttgcccaggctggccttgaactcctgacctcaagtgattcatccaccttggtgtcccaa

SEQ ID NO: 93948 - DNA, 36115 bp, Homo sapiens
taatgcaactgggccggcctgaggaggcatagcgggaaagtctcccccggggcaatggccttggagtaatgcttgaagactgagtcctctgtcctctccttccacaggaggggctgtctccatgccacctgttgacagtgagggtcatccggatgaaaaatgtccggcaggctgatatgcgtgagtatccacctcacttctctccttctcctctgcttaccggatctggatggaagaggccctggctggagaaatggtcaggtggatccgtgtgtgtgtgtgcgcgcrsacgygtatacgtgcatggtgtatacgtgtatgtgtgtgcatgtatgtgcacgaatgtgtgttctatactcaagttgtatttcagactttggggtttctgtcactcttccaggccccttgttcatgctgttccctcggcgctacctgccccgcagtctgtgcctgcacccaagagctctgttcgccctctgtctcctccccactctctcttcctggaatcgatttccaagagcacccgctttgcccacacggagcactccttgctcctcctttcggttagggcctgttggggtgaagtggaaggagaggcacttaggcatcgtggagccagctgccaggtgactcccagagccccttctcaagacaaagatctgaaactgggctctggggaccatgccagagtccacagcacccagttctacagttcagcccatggatgtggcttgacttagcagcactgtttgtgcagtgctgtttcctggcagccctaacctcccccctcatcccagagcctgctgcatttccaggccacgggggccaatggaggcatctcagtgggcagaatcctccccacccctgtctttgggtggcattttaagagatcaggagaactgaaagcccctcccacactgcccacccctggccccatccagaggggaagttggcccccaagggggaaaaagctgtatatccaggccccacaggtggggagcatccctgctcaccggtaaccacacaggaatgactcaagcgccacagggatcccgaaaggctagggagggcctgagaggggcagagaagacacagagccctgagattgagtgtacattttaacaagaggagctatctatgtccaaagcagttatagaataacaacgttcccatcttgtcaccagggagtttagaggcagaggagaacaatgagagctgggagtggccaagaaaggctgcacagagagcctggggtctgagaggggcaggacctgagtatccagaggccttgggagcccgatcttggggagaggctgtcctgagggaggggagccacaccccctgagcacctgcctggctgacctgtagccagacatccacacactacccgatgctcccagcaacttgaggagaggccctggaggcccattttgcaacragaggttaatgattgcctaagagggaagtagggtctggtcccaggtgtggagagtgtggcaagagaggagacaagccaggtatggagaaccaggaagtgaggcagaggagggattggatgccttcaaagtgttggggtacctggggtcttgaggaagagattgcatgacttcctgaggccttgtatgcagcttgtgctagagtgcaggtgcggagagtctgggaacttgtaggaagctgtcactccaatgcagggctgagtgtgaatggataagtgtgggagggccctgagccccagagacagcaaagggaccaagcaggattccagagacagagcctctggagggcaatgtgtccagagcctgcgccagcaggagtggctccagtagcctccagtttgggtctgtgtctgccaagtggccaaccaaagggccagggacttttcctcaagcttcttggggtctttcccagcctatcggtgaatgatttgaggatccagggagtgtcctctgggtccaggacgtggccacctctcttgcctttcttgtccatgccacggtggtcactcagacactttcccactcttgggcagagttcaccctcatccttgggacaacccagctcccacatatccacagcagtgcttaccttcctccaaccccttctgctttttatttttatttttatttttattttattttgagacagagtctcactctgttgcccaggctggagtgcagtggctcaatctcatctcactgcagcctcgacctcctgggctcaggtgatcctcccatctcagcctgccaagtagctgggactacaggcatgggccaccacacctggctaactttaaaaaaaaaaaattatttgtggagacagggtttcaccatgttgcccaagctggtttcgaacttctgggctcaagtgatcctctgtctcagtctcccaaaatgctgggattacaggcgtgaaccactatgcccagccctccaactccttttgaggtgtgtctgtcccagcctctccagtcacctggctgcatgcccccatgcatgcctgcacctgcatgctcagacttcccactgtccagggtcctttcttctgtcttcttcctgccacacctgtcactcagcaggtgacggggtgtgaggaagagcaggcagctagagaaacaggctgtagtctggctctacaagcctcctcccttccctacatgccccttgggcagacaggctgcctttgggcgatacctggccctctttggaaacccccctgttgcttacgttttcctcatttccccgaagaacaaggcggaaggcacatgtggcatctcggggtgccaaccccagtcatgtctggtctggattccacagttgctgcaggctgggctgtgttgctaccttgcctgggttagattaagactatcccgatgtcttttaggtcctgggttacccttgtcccaaattttttccttctagtttgaatccaaaataaacagcacttccatttagtcttgtaacttgtgcctgagtctcctaaagtttccaagaggccaaatggcagtgaatactcaagattcagggctgactcctcgataactgaaagagccttgggccaggactgagagacaatcaggcctagaaacctcccagttgtcaggagtttttgtttctcttgagaaattaaaactgaaaccagcaccccaagggatatcagacaggtgtctccagaggtattagagagacaaagttctgaacatctatagagatgattgagtcatctctgccacccacattccaggaaaggagacatgtcattcagatgaccaagccctctgtcactccactaggaacaaggattagaacttatctgtgcctaggaaatccccatagtccatgaaattctcagaaccaggtcacygttgcctaaccattcattgctgggggtggacaggggaagcagctctctgcaaaagaactgaaaaactaatgcttggaatgtgggtgtctgatcaatcttgtctctgccaggaatacttctttatcttaactagacatttaagccttaggccaaaaatactgagtttttatttaatgggctttatcggagaattttaggcatggacgaatgacaggaaaacaattttagagggaaggggctcttacagggtccatcaaatcatgcgcgccaagtgcattacagaaccagtaggtatagagctggcaccctgcctgcaggctcccagcgtaccggagacagacctgaagggtgtggtccaggcccggggtgggggggccagtgttctggaaaagccaagggaagggttcaagagggctgagcaggttcctggtgagtctccctatcagcagagcaatgagacacactgacctctgacctgtatctgcagtgatgtatctgtacctgtatcctgtggccacagtgtgatggagacagatgagtccacctgttgttgcagagcagcataggggtgctccccaggagaggaacagaggactctgggctctggggtacctggtccagacttgggtgctcagggaaagcttccagaggaggttcctactgaagtcccaaggggctagcaaggagaagggtgggtgaaagtggaagagtgttctgggcagagggagctacatgtgcaaaggcagttttgaatacaagtgactgtgtttggctggagtctaaacggtgagtgcgtgtgtgtaagtttgagtgaatgcgtatgtgtgtaaatgtgtgtgaatgtacatgtgtgcacacatacacatgctcgcacacacagggcaggggtggggtattagggagggtggagagatgagactgaggctggggaagtgagcagggtcagccactttgagtggctgggactccttcctgagggcagaagggagcccctggaggatctcgaactggggaatggcatggtcatatctaaaaagctccttgtggcttctctttggagaaaagattagagtggggcaagacaggagatgggaagcctatctgggaagtggcctcagagattatggtggtctacaccagggcagtggcagggcagatgagaagttgggggtcctgagagagacaaagggttaaatcaactgaatgtgagagtcaaggatgacactgatttctggcctggacacctgagtgatgataaggaagagcaggttgagcatagaagggaagagtaggttgatgaggtcatcattttcttttgattctgttgggtttcaatcattctttttgtctggattaagtgattatcatgacatctaaaagagagtgtcatctcacctttcttcaataggaggagggctgtgaattccaattcactggatgatgaggcctcaaagattaaccagacttcagggatgaaatcagaagctaggaacacctgtgatttagatcagggctgttgattctgataaacctttcagtgtggtgacaacgcagggcgaagaaagccctggctccactctcatcagtgactattaataattaaaaactagtttgaatcagtcctaccagtgtagaactcccatcctcctgccagctttaccatcgagaggactctctgacactggaaactgctggctttcaccatttcctatgtatctggtgtgtaccctgggcctcaccctcrccaactgccaggagagtgacaggggcagtcatggcccctctgcctccctcctcccaggtagactagagcagggagccagtctgggctactattttcaccctatcccttctgttgctccaggtggaagacttaggagaccttctgtcattttgggagggcttgttggggtcaaagcctctgtcccttctccagagcatatccagcaacatcacacttgggttgttcatttagaatgaaaaagaagtatgtggccacagaggggagggtttcttgggccataacctgatgctgcagatcaggataggtaagaagagcctggctggatgcagtggaggcattaagccatatggagatgggggttcctgctcctagatcttgctgaatagctagtttcactcaagtccttgcccactggggcccttcctcttggccgactcacagcagagtgttccttctcatcctcacttctcctcagcccagagggagcgcttggccctactttggttttcctggtcccctgggctaagacaagaagtaatccggacccttggggactggtcttccagatcttaccttggcagagggaaaactgtgtgaccataccttgtcccaaaccagcaggtgtttgctcagggacaagggtgcttctaataagagccggaggccatctgtgtctatgagaatggccagtgggattgggtcgccctctgcgagacccacagcctgcaatctgtgacttcttggggatctgagtctctggaaagttagacccatgaatgaggagaggaactggagctgagatggggcctggctctggaagaggcttgcctgaagttcccttttgactccacatgttctctctgaacctggattggttccacttatctttcttggacagtgagccagacagactgttttgtgagcctctggctgcccaccgcctctcagaagaagctgaggacaaggaccatctccaactgcccaaatccagagtggaatgaaagcttcaacttccagatccagagccgagtgaaggtgagacatggaggactgcacctgtcttccctgtctgcattttactcccctcttgcccacttgtccttctctttgcctctgtgttcttatgcctctttgttttcctttctgcctacttcttgtcctacaaacctgtcttcccactcacacccactacttccttctgcctgtctcatgtttgcccctctctgagtctatttctctttctagctttttctcctggtctctcttgtcctaattgttgctgaaactaggtgtctcttaatccaaaacagattgtgtttccagagccttctccaagcaggggaatacacagagtgaaagaaccattctattcactaggtctgaggccagtctaattccagccagagggttctctccctcttaaattcttttcatattgctttattatttccatttctttgggtgtgtattttatttgttgagttgttccatgggattggtcttcttcagatatatgatgactctaagttgagttcacatctcccatgggataattatcctttgagcatcctgagttgtgacagcctcagcagagatcccttacaacaaatttggcctcatcatagtggcatcagccccagtctggaggtgcttgaggcttgacagctccaccttactgcctccatgttttagggatacttatttatttttgttacgtgacgtatcttttcaagaagggctttatacttattatttttaaaataccttttctatcatacatgtgagtttggtaagggaggagaattttgatgtgggttcagtctgccatcttgaaatcagaatttgagcttcctttggattgtggagctgctgggttggttctgggacatacctgtgtttctagtaattacaaggtcaacaatcacatcccgttgggaacctccagaaccaccttatgtccactagatgtatttaagaggcagcctcaacccacatcccccaggatccttggaacaagaggcctcagagattagtccatgtcacctgagaacactgacctcagagttcagccagatgacaaggtagctgctttgggaccatccatgagaacttactaggggctgatgagtcaaaggatagagttcatataccccaccaattatcagaacccctacaagctttgccacatcactccctggagtgttagatgttcgattccctaatctggattttctagcaccaaaggggctgtcttcagtgcccaggggcccagtgctgaccacattctatatcctggcaggggtcttgcttgctctttcccatccatccttcccctcaggtgaaactaaatccttccatacttcacaggtctctaccaagcttgtaaaagaggcaaaattctctagcaggaaagtgagaacagaaggccaagaaggcttcagggagttggaaaggagggaatagacacttgccttccttaattcgtttccctacaaatgtctgtcacatctgagcagggacttctgggctgtctcccatcccccagacctacctccttgctaggacagaggtcaagccccttgttctgggaaggggtcaatgcaaccgtggtaaccagactggcatccttccttctcccctagaacgtgctagagttgagtgtctgtgatgaagacacagtgacaccagatgaccatctcctgacagttctctatgacctcaccaagctctgtttccgaaagaaaacccacgtgaagtttccactcaacccgcaggtgggtgcagggtacaggccctcagactccggcttcatgataacctcatagctgytgctgattcccacaaagccattccccagggtcttctctgtgtacacagtcaagtygagaaaagatggtgctgctggtttaaatcccagcactgtcactcwctatgtgatgtcgtaaaaataactccctaagtttctgtttcctcatctacaaaatggtgatcataatacctaccacacaaggttgttgtgggacttaaatgagaaaccataattcaggcaactagcagtgttcacagaacacaayggagaggtagtaagtcttggttcccttccctccttttcttccctcagagtcccattgctggratggccccaggaacagaggacagatgagggtaaaggtgggcgaatctgcagatcagagacagtcagagctggagcccccaggatgctgtcaattcaatcattctgccagcatttgagtgcctgtgaggggccggcaccgttctaggcactgggtccccttgggaactagcatccctgccctcacctagcttacattctggtggggaaagtaaggcccagtgaggccctggcttgcctccagtacacagcaagaggtgtgagggactcagtgaaggaaggaatgggctttctgaaggcgtatctcagcgctcccttgccacaggcactgagtcccttgggaaggcaggagagcggtgggaagccagggaagtgacagaaaggagatgctctcgggcagaggaatgtacatgctggggctgggggtcagctccacaccctgacctcccctgggctgtcagtgatgctcctgatgtcaaagacttggggacagagattggcagaggagaccacaagcacactccatggcagcaggcagctgtgggggaaggacggaggcaggtccacagcggctcccagggtggcaaagggttctggtcagcagagatgtgcagacgccactcacagctgccttccctccctcccctaccagggcatggaagagctggaggtggagttcctgctggaggagaggtgagtaggcccaggccccggggcccaccaaggtcctggccatyaagtagcttctgggaacgagcatttcagaggcaggtcggcctttttgctgcctcaccctcttccagtctcactcctggcactaaccctgactcttcactgtgcatcagaatcacccaggagcttctccatagtgtaggagcctgggccccactgcacttacccagttctcctgccctcagcattgctttaaagatctagtactctggccaaatagcctgcctcaggccccctacattcccaagggtggcttctgggaagagttcctgccaccatggcgatgggggccttgttgaggcccagctgagaaagaggtcagagcccaggggtctcttccttgaccagaactgttagaacaaacaccccaaccctggccgcaagcagccaactctgcagccaactctggaaccacgtcaatgggaggctcaggcccaccttgcagggttctttccaatcttctttcttgcctgcctgcctgccttccttccttctttcctccctccctccctcccttcctccctttttctccctttctccctctctccctctctctttctttccctttctttcctttctttccttttctttcctttctttctttctttcgtctcactctgtcatccaggctagagtacagtggtgcgatctcagctcactgcaacctccacctcctggattcaagcgattctcctccctcagcctcccgagtaactgtgattacaggaacacaccaccatgctaggctaattcttgtatttttagtagagatggggtttcatcatgttggtctcaaactcctgacctcaggtgatccacctgcctcggcctcccaaagtgctgggattacaggcatgagccaccgcgcccagcccaaatcattttcaattaggaaaacgatccaggatcctggagacatgactgtgctgaggactcagagagctggaggtctggaaggagggaacaaagagggaaggtaggaaggaaaggaaggaaggaaagsaaggaaaggaaggaaaggaaraaagaaagaaagaaaggcaacccccgcctcaggccgggcagagtgccctgtaactgggcagcttgttcctcactcctccctcttcttcacctggcagggctgagccccctrtgcttgtgatgagcccgggaacagaaggaggatgacaggtgggagacaggacaagagggctcgtcaactgccacttggagaatcctctgyctaggggatcttcaaactatgtgagggaacttacttcccatcaacagctgattggcaaattaaaatcaacgttatttacttaacattgaagaaaatcgaagctctcccctccaattcttgatttgacagaatttttagagggcggggaaaactcctrggctgaattagaaagtggcttgcaaaatgaaacatgtcatgcttggtaataagagttgatctggtgaaaccccgtctctactaaaatacaaaaaattagttgggcatggcagcaygcacctgtcatcccagctactcaggaggctgaggcaggagaatcacttgaacccaggaggtggaggttgcagtgagcccagaccgtgccattgcactccagcctgggcgacagagcgagactccttctcaacaacaacaataaagttgatctggagacacagtcaccttgggcttaattttgacaagggatgctgtggactctgccaggctaattgaaaccttggaggcttatgttctcaactttataacacaagggcatttaacattcaccctctcagctgggycagactgttaaatgcataagttagataaagcacagaatggagaatggatcattttcactaccaaaactgtttatgtctgctctagctggcaggttgcagccatttcttacaacctatttattcttctaaccccatgcatttgcatctggttagacataaaaaacagttatcctttcaaaaaaatagaactctcctactcttctaacctataaatctatttttttcctggacattctgtttcaaatgtaggccagtttcctccctgacaacctataaggctaaggtttccgaagctagtattttttatgagaacaaagaaggctctgatattttgttattgaccctatttattccctttgtcgccattagaagaaaccagtcaagaatgctagaattgaccaggagttctccttttgtttttcagtccctctccacctgagaccctcgtcaccaatggcgtgctggtggtaattatcttcctgggttcctgtagctccagaggccacggctggctgctgctctcaggggaacaggaccaagggagaaaacagtgggcccagcttggtctctgtcctatcctgacctctgcaggagttagactaaacgaggccagccaaatggggcacaggcagcactggggcacgagctggggcttctgtacagagggaggaggtagctgggacatcaccctggccgagcacttcatatcccaaaagtgacccttccccttaagagcctccccaataaaacaacccactaagtgcagcctcctctcagactcagtcttggtcctgtaccccacaaccccagtaattctacaagcacagtttacctttttttttttttttttttttttgagacaaggtctcactctgtcgcccaggctggagtgcagtgctgcgatctcggatcactgcaacctctgcctcccgtgctcaagcacgccaccacccccagctattattttgtattttgtagagacggggtttcaacatgttgcccaggctggtttcaaactcctgagctcaagcgatctgccagcctcagcctcccaaagtactgggattacaggtgtgagctactgtgcctggcctacaagcacaatttctgtattaaaaattgtttcatagccagtcatggtggctcatgcctataatcccagcactttgggaggccaaggttgggggatcacttgagcccgggagttcaaaacaagtctgggcaacatagtgaaactccatccctacaaaaaaatacaaaaattagccaggcatggtagcatgtgtctgtagtcccagctactcaggaggctgaggtgggaggatcgcttgagcccaggaggtcaaggctgcagtgagctgtgattatgacactgcactccagcctgggtgacagagtgagaccctgtgccaaaaacaaaaattcatatttcggctgttggtacagctattttaattaaatgcatccagtgcctcagggttcaaggagacctctccctcaaaaagaagagtctttgggaatgtgtggcaaaggagtatgatctgcctcagcatcttgacaaggctattttgtcggaagccctcactttgaaagcccagagctgaacattccctcaggtcagattcccgacctgcagctgaggacctgacccctagtaaactgtgaccgtgggtcctagacmtcctgggacagcttcgtggtcaagtatcctatctctgagtgagatggcatgccttgattgggttcagaaaatgtggtcaacacattctgcattccccagcatcagcccagtcagaccaatgctgaatgtatcctctggtccctcatctcccttcagcctggaagagcaaggaggtggctggtgctcagacactctgtgaccctcctttgttttttacagtctcgacaagtctcctgcctggaggttcatgcacaatccaggaggcggaggaagagggagaaaagtgagctgttttgccttttctgcctactgggggacaagggggagctgcttccaaatcccatcagcatcagactccacctagtccagggcttccctgggctcagggggaccaaaagctcggctgaaacccctcagaatcatctcacccccaggggtcctgagcccctggcctcccatcctgctctgtaaagggcgtgttcgcccaagcacccacataaccttggagtatctcaggtctggggtcccagtgctgctccctctatccacgcttgtctgtgctgtgccatgccaggacctcagattgcctaggtcagtgaggtggtcagcacccgaagcccaggrcccctctaactatgccccttcctctaggcagaccacagctcacagagggtcctagcactttatagctggcagagacctaagagatccatgaataccatacccctaccctactccccaccccaccccatgttgcccatgcaaggctaccagacatgagggagggagggaggacagaagaggcgtctacatcaaaagcgacagtgtgcggagggtctgcctcctctacagtgggcaggttactttggggcatcttctggcaaagctgagccaaggactggtcctgaggaccttctcagcatctcaaagggttttctggggactatgtttgtctgcatcctcataaacctcattaaaatgcaggttcctgggccctgccctaccctatagattgagaatctctggggaatttgaactggtgccccaggtgattctaaactcctcctggatacctccaaataggttttttgctggaccaagttgcrggtgggtagtgagaggctcccagggtctcaccctcttgtcctctctcccagtgaaggacctcctggtgatggtgaacgaatcctttgagaacacccagcgtgtccggccctgcttggaaccctgctgcccaacctctgcctgcttccaaaccgctgcctgcttccactaccccaagtacttccagtcccaggtgcacgtggaagtgcccaagagtcactggagctgtggggtacaaggcggctgacactgggggaggtgtgggggactgggacaggtggggggtgccagaggagctccccagcccctctcacagaacccacccatccctccagctttgctgccgctctcgcaagaagggccccatcagccagcccctcgactgcctttccgatggtcaggtgatgaccctgcctgtggtgagtgcctgagtctgggaagggcccctgacttacttcccctggagctcctgtggtagggaggtggggagagcctggggaggtacaagagagaatgtgactcgtgagggtctctctcaggcaggatggaggagtcttgtggggcaggagactgatgagctacagtgtggtccaaagagtgtatggaggctgagttgaagatggtggggagattgtgtccagaagagagaggcagggatggagcgcctgtgtgtgcacgtgtgtgctgagtggggtctgggtggacagtgtggatctgggatcacttggctctgaattgtcacctctgacaagcttttcatctttccctccccagggtgagagttatgaattacacatgaagtctacaccctggtatagtacccgcattctgtccgtgcctctcacttattcatagcagtgggtgtgcagtggtatctcactgtggttttgatttgcatttcccctatggctaatgatgttgaacatctttccatgggctggctggcatatcatcttctttggagacatttctattagatcctttgcccactttttatgtgggttatttgtgtttttttattgttaagttgtaagagtgctttacatatgccagatacaaatcccttgtcagatatatgatttgcaaatatttcctcttattctatggcgtatcttttcacattcttgttggtgtcctttgaagcacaaaggactttacttttgaggaaatttgtttttttatcttgtcacttgtgcttttggtgtcatatctaagaaaccagaaatcattgcctaatccaatgtcctgaaatttttattttattttattttattttattttattttattttgaaatggagtctcactgtcgcccaggctggagtgcagtggtgtgatctcagctcactgcaacctctgyctcctgggttaagcgattctcctgcctcagcctccccagtagctgggattacagatgcacacctctacacctggctaatttttgtattttcagtagagacggggtttcaccgtattggccagctggtctcgaactcctgacctcaagtgatccaccctcctcggcttcccaaagtgctgggattacaagcgtgcgccaccgcgcccgaccaaagtcctgaaaatatattcccatgtttttttctaagacttgtttagttttagctctcacatttaggtctatgatcaatttttaggtaatcaatctacatggtgtaaaagaggggctcaacctcgttctttggcatgtggatatccagatgtctcagcaccatctgctgaaaacaacatcgttttcagaaatcttgattgtcagaaatcaagtggccatgatttctattgacagtttgattagctatttgcccttggaaaagctytttgcccttactgagtctctgttttcctcatctgtacattgggagaataacaaggatcctgtgcatcactgggttgctctgaggatccagctagacagcacgtgcgaagtactcagtaatccatctggcaagtgggatgctcagcaaacgtcagctaatgttattgttattattgttgttgtattattattattcattccctgttgaggccaaagaaagaattattttctaacagccatgtctgcagccctgtgctggacaaagaggagacatgatggaaatctcctaggcccagccttcaaggagatgtggctttgtcagtgagccaaggctcagttggaaatggtcaaggtacattcatctggagtcactggggagctgggcctcagaggatgcacaggctggaggtgggcaaagggaagacacttctggtgaaggcaggggcctgtgccaagacccggaaacaggactgcttctgggagctctgggacctgacccagaagtttcrcgggtagtttgaggtgagcttggaaagatcaggcagggtcttggatgccaggccaggagcctggacttgtttggggcagggatgtgattaaaaaaaaaaaagaggacaagcattgtgcatgtcacagaggtgcctgccccacctgcctgcagactatgaggtgacacaatgagatcaggaatgggatggtttttgtcaattgcacacacacacagaataattgttattctaggagcaggaagagctcattgaagaacgtgagctccataggaacagggagtttgtttacctagcacagaagagtccataccgtggggccttgttcagagggatttggcaaaatgatctcagcgccttttgtcacccatgcctggccctgggctagagaagccacctgggggaagactttctggactttccagatctggccgaggagacagaggactcaaagcgtccctaacacagtgccaacagttatcttttgttgagtaccagctcgcattgtgccagctaaggctttgrgggctttgcatttgttatctctttaagtgctgaagacagtgctgagagttcagcacgattcgccccactttacagatgggaaagtggagacccaaggtcacagaagtggtcgctggcagaagtaggctttgagcctaggtccaatggaccctraagctgtgtctactccagggaggtagaggctgcaggcccaatacagggtcctctctccctccagccctgagacactggacgtgcggctgggcttcagcctgtgcccagcagagctggagtttctgcagaagcggaaggtcgtggtggccaaggccctgaagcaggtgctgcagctggaggaagacctgcaggaggacgaggtgggtaatcagggatgtggccagcctgggcccagctggtccttccagcaccatgccctcccagccaacccaggccctgccctaccccaggcgccacctccatggatgcttttactgctgaggtacaggcgccctggtgagagctgtgctggaagtgattctgttttatattcacaagagaaggggagagcaaaatggagacagaaaggacagagccccagcgcctcctcccaagcactaagagttcctgctgtggctaaaggggccttactcagggataaaatgccctcctcaccccagccaggaaaacattttaagctgtaccaccttctgcaccccacacctccacccaaaaggccttaggtccttctttcctcaattgtctctcctctcaaatccgcacaggtaaacacactcccagaaataacagcgctaggaagctggagagaagcaacttgcactcctagggccagaccgccccttcttcccacgggagcagacggtgggcctctgtcacagccctctgttgcctcccttgtgtggaccaaggcccacactcgcctgggcagcaggcaagccctccaagcgcctgctttctgaggctgaccctaggtgaggacagagacctggcgggtgcccgaggaggacttgtaatagcgctttagccaatggaaggttcttacagcccccactcaaaggaaaacagacagaatgagtcttgacaaagagccccttcctccctcctwtttttttttttttttttttttttttttcttgagacagggtcttgctctgtcacccaggctggagtgcagtggcaccatcacagctcactgcagcctccacctcccaggctcaagcaatcctcttacttcagcctcccaagtagctgggactccaggaatgagccacaatgcctggctaatttttgtatttttttgtagagatggggtttctacatgttgcccaggctggtcttgaactcctgggcttaagcaatctgcccacctcggccccccaaagtgctgggattacaagtgtgagccattgtacctggccctatctttagggaaacattccaggggcctcttaaacctctgctgacccagagctggcaaccctgctccttcccacatcaccagtccattgactcttggccttgccagtacagtacctgctgagcaggcaccatgtgccaggcctggtgccttccctcagatccagctacagaagatgttggtttgtcccattgagggatcgcacattagtagggttcttgaacaagctgcccaccaccctcggaccccagttttatcacctgttaaccgagggctagactaacagtgctaagaactctgctagccacagctttctgtgatttaccaagcctgtgttaggcttcagagtccttcactgacaccaacttctgggtgtggagctgaggtctatttctagacccactgctctgtggaaaggcaggtgtcaggtggctcaacgccgcactccctgccctctgtagccagctctgcctcctccattgttctttcaaagttgccgtcattctaagtcttctcccaagctttgcttctggagccttccccaaccgcctgcctctgtgtaaccccaggtgccgctgatagccatcatggccactgggggtggaacaagatccatgacctccatgtatggccacctgctggggctgcagaagctgarcctcctggactgtgccagctacatcacyggtctatcaggggccacctggtaaggagacatgagccactgtctgtggagcccagggcaagccacgaacaggctggcctggggtctcaggtgaagctcctccccgccacccaaagacaaagtgactcctgaagcctgggaagtgccccacatgcagtggtgtggccttgggcatgcagcttgactccttggaggctcggcttgtgtatctgcacagtgcggataacagtagctctgacctcatgcggtgggtgtaagacgctctcccgctactaagtatgccagagacactgtatgccctggcctttcctggtgttactgtttccctggggctgtggtatggacccaggaacatgaccccatactgctggggacatgcaacgggcagggccctgcagctgagctccctccttctcaccctctgctggtgagcagggccaggggctgagcactgggttcccccacagggaggccagggtgaggtcagcttacccacagaaggcacagtgcctgcggctcactgtacttttaggggcccacaaaaataggttaatttcttttaaaatcaggatcatttcattaacaaacttataggttgaagaaaatgttttaataaataatatgaatacatttgtctttatacaacagtcatgaaatataaattttaatattttttatgtggccagcatgaaatataaattttaatattttttatgtggccaggtatggtggctcacatctgtaatcccagcactttgggaggcagaggcagaaggcttgcttgaggccaggagctcaagaccaggcygggccacatagggaggacttgtctttaaaaaaaacaaaaataaaaaacatataaacattttttgtggggcccatcaaaaccctgcgtggccctggttcagggtggcctatcaagcagggccgtgtcctgtctgtgactggtgggcctgtgagccctgaggtcccttgctgtgccttgtatactggaggagctctgggtagcccccgtgtgagcaaatggatgtgaatgggccttggaaagccaagggctcctgtgccacacaccccccccggggggcagaggcgccagcccaggtgagacagaaggagacatttgcctcttgctaagcactggagtcactgcttcctatggctcatcttgtttcttcctcacaaaaaactatgagrgaggcattgtcattatttttcagctggagaaacagagtaatttgccagggacactcagttaatgagcagtggagtagaatttgaacctagtcccgggcccacatccttaacctccatgctaaatggctgcccccggtagtaggttaagaaggtaacttgcttccagcaggttgaggggcacctgcgtcctcccggactactatgcgatagacagatagcaggaggaactcaggcccagccggggtgggatgggtggggtcccctggcctggggaaagcacaagtcgtattcttttaaaaactcatttgcaatggcttctggaagcttttttaaagtataaaatgaatgggtgaagcttatggagagcagggtgctttttgttgaaaagtctcctgaccacctcccaccttcccaaaagcaagtcctgtgagggaggaggcccctgtttccttaaatgtgcagccgcagactagctgcactgccagggaggtcattctcaggcgcagaatgaaaagggccctttcctgtcctgacgcagaaaagctggatccaggccaagaagaggcagactgaggccagacccagggctagtgggatcacctctttgttttgctccccccgacaaccaacatgtaagttaagaagagaaagggaaataaatcctcagtcaacatcagaattataggaattaacatggcagagtagaaacagccaggacctgtaatcagtcgagcctgggtttaaatgtgggctccagcatttgttctgtgccatgcactgttctagctaccccacatcaccttaactcatgtaatcttcaccagaactctgtgaagcaggtacaattattgtaattctccccattccacagacaggaaaactgaagggaacggtgattaagtagcttgcccaagatcacacagctagtgagcgacagagcctggcttgatccagaaagttctggatccagaatcttcatcttaaccactgttatgcctggcacacagtgggcatttgagaactggtagcacttgtgattatgagtaataatgttcacctcccctgctcctcactgtctgccaggyctctgcctcacccctactctccaggttcccctcctggcaggttagggttctcaatggcctgcccaccttccctcctgcccgggtccaggactcatcagacaggggccgggtcagccctatcagctgtgcctgtctctttccaggaccatggctaccttgtaccgtgaccctgactggtcctccaaaaacttggagcctgctatctttgaggctcggagacatgtggtaaaggacaagctaccctccctgttcccagaccagctccgcaaattccaggaggagctccggcagcgcagccaggaaggctacagggtcacctttacagacttctggggcctgctgatagagacctgcctgggggacgaggtaggtgctcrgcttctcctgggccccaccctgccctggctgatgcctggctctctttcttcctcaggggagtcaggacttccattgcacacaggggattaggttagacctgcgggagtatccttgggctggaagaccgataaggtgtcggactctatgacggaggaaggtggtgggattgtctcccgtgtaccctttagaggatggctgagaccctcgtgttggaggcaaacctgcctagggcagcacgtcctctgagagccacgccaagacacctgtgagggaaaaacggggaggaagccggggaagactggagagcagtgacgccrtgaagcgagtctgaccctaggggtggggagaggaagaaaggtcaggcggcagcatcccagaccaccrtgtggtctgcaaggcccttggagggtcctccagccaaagctggctgtcacaggagtcccgcgtctcccagaacgggccagcctcagtatccctgccccactcagtcacaggaagtgcagcctcagcacagactcagctgtggatttcagagcacagcagctggggtcctcagtcaataacactctctrcagttggaggtctgcagggcccgttctcatggccaccagtgggcccaatgaggttccttcctattctgagatccagygatctgactaatacgtgcccaagaagaggaccagcctgtgttgggtggctgctgctgtgagagctgckacccagcacagggtggtccttttcctggacacatggcacagcacagggatctccaaggggtgttgcgatcctggacatcagggtgggctcagctgacatctgtgccctttaggttgcacaagccgagattaacaacttttgttgttgcctggccccaraggagagcttcccacctctgtccaggcccacggttccctgctccactccaaaggtgtccggggagttctgaattcaaatcagaacttgccagaaagtcattgcagcaattattttttataatagtaggttccatcttccagaaagccagacagtttgagcacctgagaatgaccggaccctcatcttcaatcttccctcattccttcaattaaattacttgagtacctcctgcatgccaggaactgcgctggcaaatggggattcagaaaggaatsggacatggcttccaaccccaggccctcgccacttctgatggatcccacccaccctgcccctgtgataacccaccacttaacctgtcctccctatgaagcagagcaggcagaggccaagggcatcggccttgggattcagtcaggatgggtttgaaattcaggccctgctctttactattccttaagtgggaattacatcaataagtgctagttaacattttcaacaatattgtaacaatcatgagtgccgcatatgatgaggaggaagcaccgagtcttccgacatcaggagtctcagcattctgggggtttggtgggaaggagctgggttcccaggaaagcaagggcagggttgttgttgagaggcctctgctcttgcgctctggccaggacaggagcccctttcccttgggccaccttgacaatgaatgtggaccggctcttccctgagcctgcagctttacttccaggacagtgggctctgtgatgcccagwtctctgggcccagttatgaccctgttttctttcaaaggagacccacatgtcattgggcatatacatgtgtttgccattccacacrggttctgtagcctttgcacactggggtgaccagggttggtcacccaggagtcagctgcttggcctggggtcagagcctgggcctctaagaccttgattctgcctcgtttgcagtggctgattcactttgggaggtggactgtggcccgggctgatctgaaaggctccccactctggggattagagtgacctcagcaaccatctagtgttcaagtcctaagtcttttgttaaaaaaaaaaaaaaaaaagaagargggaagaggaggggagggagggaggggagggcaggggagcggaggaagggaaacttcttttcccccaactttttacccctcagttgagggagctcaacatgccaagctgattttttttaaaaaatggagatgctaaacatggagctgctccagttctagcagagggaagacgatggggcagaagaggggcagtgctagcctctcccaccccttcctctttatctgctgacccctaagaccaagaccctgggactctgagagactgtcctaaactgcggatccagtcccggcccctgtctggtggtgggcagcccgagggggtggtgcctatgccattggtgccctttcagagtgatttggctggtgtcagctggggccgatacagcagcccggtgagctcaggagccaggaagtggctgcgggggtccagattgtcttctcattctgcactgcctccctcaccctctgggctgctgcttctctttaaccattttgtttccccacagagaaatgaatgcaaactgtcagatcagcgtgctgctttgagctgcggccagaaccccctgcccatctacctcaccatcaatgtcaaggatgatgtaagcaaccaggacttcagaggtaacaccagtggctggtgatttacaagtggggtggagggggggacttcttggtgggcaaaagcacccagcacctccaggtcccccaatcccactcatctttgtcaacctctacatccagactgtgcacacagctggagaaatcacctttgctaccccaatctgccctgctgcatgggtgaggccggcaggcactgtctgcagcttccctgggcatgtgtttaatgacactggggaagacaaaggttgtgaaaggaagatatttctacgctgcccagagagagagagactcgagagagctgccctgcttcagggtcagtttttgtcccattcaacaggctctgaggtgcaaatgagccatcctccttgcaaagcatggcaaagctgacccttgctacaccagcagaagctggccaagggtgcccccatgtgtcctttgggggaactgcggcctccctgtcccaggctttccaaggcctgagccagtggctgcaggcaggaggggggcccggctrtgtggacggctcccyggcctgagactgacccccgtcctgctgcttcatgtgcagagtggttcgagttctccccctacgaggtgggyctgcagaagtatggggccttcatcccctccgagctcttcggctccgagttcttcatggggcggctggtgaagaggatcccggagtctcgaatctgctacatgctaggtgactgccttgcaactggcggaatgacagggggctgctgcccagtgctgggccaccctgggttggcccctgattatgtgacactcggggcacttgccagcattgtctcatcctaggagtggtcccaagtcactggggaccagagttggtctgggggctctcccaatttcctggtctccagcagtctccctgcagcctgctcagcaccacactgggaacagcagactcagacggaagcttctgtaactcccacccactcccgtctagcttcrgccagcagtgtgcctgcttccaggggccaacccagacctgggacccgagggtccagggagaccacagggtaaggggcagggtcaccagagaagcctagcccagcctcccaccctaagcgcctcggttcttcatgagctgggcccaccgaatgcaggacccactcgagttcttcccttcagagtcttasstgcgcccgtcaaagggcttcttcagaaacagacccacattcacagccccaacacgcccttatttaaattagttgtctgtgccttccccttctgtctatcccaaaccaacccatcctgcaagatccaactcagtcccatcacttcttcccccagaagcccccagcccacggtggcctctccttcccctgaacacctatgctgatgagcatgtggtttagaaaactgtgggcaaaacacgtgggcttgaactctgaactctggcttctcactcactagctgtgtaaagttggccagattgcctcacctgtcgaagcctccatcttctccttagttaattaggcttaagagtaaaacccaccttatagagattccaaatgggtcaatgtctaatgcctacatttaaaaatcataataacaaatagcatttgcatttattgagtgctcgccatgtgccaggtgctgccctaaatgctttagatgtattcactgacagcagctggacttaaactcaaagcctgcacttgccagcattaaatccctgccggggctgtgccttatacacctttacgtctcccggcactgaggggagggaagagaagagctgagagctgagcccctcagtcactgtgttgagctgcagtgggaaggggagaaggacatggaagtctgaagtctgtcccgcctgtggagcagcctggcttgcgtggggtgggggggtggggggagtggggaatcaaatgtcagtgtggggcctggggctgcagggtggagctgctcacgctggccctggctcccaggcctgtggagcagcatcttctccctgaacctgctggatgcctggaacctgtcacacacctcggaggagtttttccacaggtggacaagggagaaagtgcaggacatcggtgggtgaccccggctttccctcatggctgggtgatgggtgacaccggctttccctcatggctgggtgatggggggcggcccccggctttccctcatggctgggtgatggggggcggcccccggctttccctcatggctgggtgatggggggcggcccccggctttccctcatggctgggtgatggggggcggggtgtggaccacaaaccgaggatgaggccccctgccacatgtttccgcatcgtcacctatggcctaagacgtgggagggcagctggggctacagtgtcttccctgcctggaggggagggtgactgtaggtgagtgacaccagcgccaaggcctggaggcaaggctgccagcacccaggagaagtgaggagagtagggtctatagcagtcacaggtcactctttgaaactccctgtcctctccaggacgcttcttagctgtctcgctccccctccctctctactacctctctgcttactccatgtctctcacctgaatcctcctaaccccagtgccaggaccttgagagcccagcaaggaaggtatgagctgcttttacagtgctcacccctgggtgccaggcaaccatgtggggcttcgcataggcaatctggggactccacctctcatgacctgcccttcatccctccctcccctgcagaagacgagccgatcctgcctgaaatccccaaatgtgatgctaacatcctggagaccacggtagtgatcccagggtcatggctgtccaattctttccgagaaatccttacccatcggtccttcgtgtctgagtttcacaacttcctgtctgggctgcagctgcacaccaactacctccagaatggccagttctctaggtggaaaggtaaccctacctggctactccttgaggcctgcctccatatggaggaggaagatgtggatgtcaaggctgccatggataaagaataagaaaacttctctggctatgttcactgggccaggcacctctctccccatggtgttttccacatttggtggtgtcgtcttgaacactgtatgtgtctggcagcagggagtggtgtgggtacttaactcactgcatctgtacagtcattctatacagaatctgtacaacagtcctagcaggtagaagttggccccatgttacagatggggaaacagggggtcttactttctgcagttgtgttctggggatgccctttaatgtgagtggtgccaggcacagtggctcatacctgtaacaccagcactttgggaggccgaggctggagaatctcttgagtccaggagtttgagaccagcctgggcaatatggtgagaccccatctcttaaaaaaaaattgtttttaattagctgggcatggtgatgagcacctgtagtcccagctacttgggggctgagatagaaggatcatttgagcccaggaggtcaaggctgcaatgagccatgatcacgccactgcactccagcctgggcaatagagcaagaccctgtctcaaaaaaaaaaaaaatgtgagtggtgcccgcttggaactgggcagggatggcccagctcaggaacccccaagtggtaagcagcagagccaggccttaaactgtggtcctgcagcgtcagctcagtgccgcctcctctgctgctgaggccctaaggcattgactttcgccttcttaatattttaattggccgtggcctgcaaatggctgcttcagcctggcctgttaagcctcatcctcaccatctggggccaatgggacagctgactcagggcccagggtttacactatttatggggtggtcttaagccccttataccccacaagtatcaatatcccataaaagactagctaaaagcccaagataacgctgttcttcctcagccacccagagggcactggaactcagtgggcgtcctggtcaggctgaggcgaaggatgctccagacagggcgctccgtccccccaagtgcctctgtccattggctgtcagggcaccaggtgtgttggtaacgggaaggcttggctttcagacacagtgctagatggtttcccaaaccagctgaccgagtccgcgaaccacctgtgcctgctggacactgcgttctttgtcaactccagctacccgcccctcctcaggccagagcgaaaagccgacctcatcatccacctcaactactgtgctgggtcccagacaaaggcaagtgcgcagcctccctcctgagcatgggctgcagcctctcctaagatgggccccgcagtcagtggcctcactcgctgtgaactgggaagaggcatgctctrgacagcccccagagagcatcagaggaagccaagcagcagtcatgatgggaagtcagacacccagaactcacgggcagccagctggctctcacaccatggtgcccatgttgacttagcaaattcgaattttactcttgccttggagcatttgccatattgggcaattcttcagctacaaaaaatgagtttttaaaaataaccttagtagagcccattccattcaagagcttgtaatatcctattttcaaaatgatcacactctcccttcccccagggtatatgaccctccatgaattacactcaagtgctctcaggtgggagggaagcctggcgagagaggagggcacttgtcagaaccagaagtttttatttttttaatttactttggaaagttctatgtgtatacagttctaccctgaagccaggcgaagtgaagtgtacacagaccaacagggcaacaatgaaaacaatctaagtttgtaaatgggtaacaatgcactttcctacgtgtgatcttgtttggcccttacaccagctcttggagggagacggcacaactgctatcatttctcatgttatggatgaggaaaccaagacacagagagacttgcttaagatcacacagctagtgagcagaggaacgaggggcagaactgagggggttctgacactctaaggcagtgctcttcctgcgacatcatgcttttagagatgcccttgcagagtcttttctagccctgtactactgtcagctccaaagcccatgcacatcccacaggggcctgggcagctctggctgtgtatagcctggttccagtcgcccttccaggctacccaccacatccacccaagtctgtgtttggatgcgaacaccaacgaaagggcttttgtccattttacttggggaagcagcttgcaactggaggtgcatccacctactgcctcgggccttttgtcctgacctggctttagtctcaaaataccatacactggcaaagcagttggggagctgagttgttagctggggaaatcaggaagctggggctaagaactctgtgcttctcctccactcccactcctcctaatgctcaaacacgccctctgtgctgttccagcccctgaaacaaacctgtgagtactgcactgtgcagaacatccccttccccaaatacgagctgccagatgagaatgaaaatctcaaggaatgctacctgatggagaacccccaggaacccgatgcccccatcgtgactttcttcccactcatcaatgacactttccgaaaatacaaggcaccaggtgagctgcctctgtgctcagttcccagcacctgctgcccttggcccgggaatgcctttagatctgtagagtctctaagggcactaacggggaagcctggctcagctccagcctgagccaaccttggcttccacaaagaagggcgcctcccattccctcacccccatgggctggtagtgtcatcccccattctttcagtcattctacattttctgacattcagccatgtgcccagtactgtgcttggtgctagggcaatcctccaatgggcaagyctgcaccacgccctgaggagcttgcaggtgtgcaggtgcgtgtgtgagggtgtgcgtgtgtacaggttttcatgcaggtgtgtgtgtccgtgagtgcaggttggtgggccttggggagagatgtggaaacaagtcattccaacctaacatgacagagtctataacaagtcatcctgctgcccrcaggtgtagagcgaagccctgaggagctggagcagggccaggtggacatttatggtcccaaaactccctatgccaccaaggagctgacatacacagaggccacctttgacaagctggtgaaactctcagagtataacatcctgaataataaggacactctcctccaggctctgcggctcgcagtggagaagaagaagcgcctgaagggccagtgtccctcctaggccccagggagcctcccctgttctgtgtcagcttctaccatcagaggtgcaggacccctcagggctgaccaggttactacgcagccagctctgctctccggcaatgggtgtgagcaggttggcctgggctttctaacgaaaagtaaaaaattttaaaaagttgagaaagtcagaaagagagagagaggagctctgttggggttttatacccactagagtttcttcaagtgcttccctatagagaaggtggtctcatagccacaggctcccacacatctgtggagaggaaaagcctggggaagaggctgggcccccagaaacctcgactcagaggcagagcccagggctggcagccctcctctctctgtcctctacctcgtgtggcgggcctagggaaatgcacagaaggacctgagaggcactcggcgtttcactggaaaaacacttcaaaatttaaggcaattctagtcttgtgatttttggktttttttagacggagtctcactctgttgcccaggctggagtgcaatggcgcgatctcggctcactgcaacctctgcctcccaggttcaagcaattctcttgcctcagcctcccaagtggccgggattagaggcacccgccaccatgcccagctaattttttgtatttttagtacaggctggtctggaactcctgacctcaggtgatccacctgcctcggcctcccaaagtgctgggattacaggcatgagccaacgcacccggccctagtctcattatttttataggcaattatatttcatgatttttatttttatgaatcggagtattaataggaagcatgaagctagaagatctagatggagccctagaaataagccagtctctgccacaacaaagccaaataggtggccggtttcagtggctctctccagctacccagagctccagggctggtgatccatgtcatcatgaccagacagccatgcccaagcatccagctccaaacaaatgccaggcaaagcctaagtctatagcccaggttcaccaaatgaggatctgggatggagttcagcaaggtcaggcaggctgtgggtaaatgaggttgggggccaggcaggcgatgcatccagcgctgcccactccagctgtcggtgctcactgacgaccctgctccaagagcatctctcagcctcttactgcccatctctctggctgcctcatgggattacttatttctaaatgtgattcstcttatctgtgttgtcaacaccgtgaccagtgcattccaactcttggagagtcacccacagagactgaaactgggaagaattagtgaaaaaggactaggttagccgtcagaggaagaagcccgccctttaagattgcttcctaatgaatctctgggaaaaccctgggacacagagaaacccaaagtcagcaggtctcccttcaggctgggaacataaccaaggaaatgtataaccggagccactgacaggcccaggctgatagaaggtgaaagcagaaaggcaggaagacatgaggtctgcaggaaacccagcaaccctggaaggcggagtcccctttctgggccaccatgctccctaagcagtctttgggttgtgaggaaaccagtggtgacaggtaccaaaagtttagaaaaattggcctccgatgtacatccttgctactcaaagtgcagtggggagctggttggaaatgcggaatctcaggccttagcccagctgtactaaattagaagctgcatttttcaggagattcccatccccaggcgccccccgtgattcctgtgcatattgaagtttgagaggcctggatttacgccactccctcccatgagcttggaacgtatgaatcagtgctcccttgagccactgataaactgagctctggacctgcaaaactggtccccatccaggtaatgctaacctgggacaccagccctcccctccaccagagcaactggctgcctccactttgacatcttttctttctgactgcaacagactctccttccagtatcaaagagtgagccaagcaacagacaggacttgtttatcgtaaggcgaaggcagccatgccttggattcatcaaaagtttgtgaaacgaggtttataaaatcatcatattatttgtgcatggaataaaatggccatgtgggtgaatgctgctgactcatctgctttcattatctgatgctgcaaaatatgcataaccctgccctcatcccttcaggcttcctcctctccactcctgggggagtgagtaggccgtttccatcccatcccaccttttctcatgcagctttgtttcctactgcaagggtctcttctagtggtgaggtgctcctctgttttcatgaagccatgtcatcaactagtggggcaccagctcgtacagatccatgctgttccaagctcaggtatatttcaggaaacattgcttgagaggaaacagaggcagttaacaccaacgaaacacctactttgtgcacagcaagctgtaaacagtctctgctttccaggaacttacattttggttcgggagaaaaccatgaaaagattgttatgcatacatgagaagttaaatggtgagttggctaaggaaatgacaaaagtgtcatcaactctgacagggcaagcacatggtatcctgcagaagtcaggggaggctcccttcccagttccctgctctctgcctatgatgaagatgatgaaattgacaaaatgaatgaaacccgtccctccttgtctccaccctttcttcccaaaagagcaaccagcaccccacccgctcccacacaccagttaccctgtccccgctgcctccccacgaaaacacttctcctcaaggtcaccaatggcctcctcattgccagatgcactgagccaaacccaccagtcttgtaaaggccttatctgacttgattgttctcagtgtttgcaccgcagaccactccctccttctggaaaccttcccttcccaggacttccttgccaaaagcagttcaattcagttcagcttgcaaataactactgcctgcccattacatgccagtcactgttgtaggcactggggccacaagaagaattaacaattgattccaaactttaaggaggttccttctggtcccatgtgggaggccctcatgtaaaacagagcccttgtgatatgaagagaaagctgcatgttagctgtgtccagaagaggcataggaagggctcccaacccagccacagaggggaagaagtcgtgttcactgaacaccttctgtctcgggtttcttcccctggaaaggtgggagcccctcctctggcctctcttttaactgctgccattcctcgaggctccttagctctttcctcttctcactctgtactctccttaagcaacctcatttatacccaggacttcaactactgcttctaatttgaaaattcttaaccttttagctttagccaagccaatctcctggttctaaacccatgaattccaattctgtgcctattagcaatgcttttgccgtataacctgaagatctaaaattacagtggcttaaacaagagagagagttatttctctattatcagagaccaaagctcctttctgctctcttctgtcatcctcaagattaccatctggtccaatattgctgctggagccccacccatcatgtccacattccaggcagcagggaagataaaggaatctgcgttcttgctgactacaaagtgaccaaacttgtcctggactgcctatgtctggacttcttctctgtgaaaaagaactaaacttttatcttaacatagtaagaattaccagctgttccagttatctactgctgagcatcaaaagccctcaatgtataatggcataaattaaccaccattttattatgctcacagattctgtgggtcaggaatttgaaaagggcataactgctccatgtttggggccacaggtcagatgatctgaactgctggtgaggactccagtggttgggatctgggaacagcctgggctgaagggccctcgtccaacgactctttcactcctgtgtctggtgcctgggctgggaagtctgtgaaagatgaaaggcaatcccagctaggagtgtcaatcagagcaccttggtgaccccagcatgatggactcaggatggtcagtcttcttaaatggcactcagggttccaagagtgtctgttacagtggcagcagcatggcccattatgacttagcctcagaagttacgtagctccacttccatggaaatctattggcagaagtagtcacaagccagtccagattcaaggggaggggacaatgaacccatctctggatggagggcatgtcaagaactgtgcagccatattttaaattccagctacaatatttgaatccttaatattgaccttcccccttgtccgctgagcacatgtcacattttaggttccgttgtggcagactccatttctggtaacaaattgattattggttaggaattgcatgtttatttctgaaaaatggtggcttaaacacactcatgtaaaagacatccacaggaaggcagttcaaggcacacctacgattcgtcagggaccctgcttcttctggctctttgctttatccacccttatgtggtccttggcttcatggtccagggtaagccctggagctccagctatcacacccatattccaggccaccagaaggaaggagaaaaaagattgaactccttcttaaagggacttcctggaagtcccacacatcctgcagctaacatatcaccaaccagaacttggtctcatcatcacacttaactgcagggaggctggaagtttttgttttttgcatgggtggcaatatgcccacctaaacatcagagttctgctgcgaaagaaggacaatttatacgcagctagcagacttcctgcaagtacctcctagccatctccacctgtgtgtcctataagcccctcctctgggtggtggcagtgacttgggtgagtggccacagagaaaggccatcagcgtgtgagagcaccaggccacagcactgcctctggtctcagcacgagtctcccaggcctttaaccactctgcaatccagttttcagggtaaaacactggacttgatcaccatttaaagccaaccactgaacatggtctagagcaaatcttctgaccattattaccagcttcctaatttcaagcgtgcattcaatacaatagatttccgaacaactaatggcattcccttgtagaactgcctgtgataggatttgacctgaaaaacaactggattcagatgaaagagtgactgcaattgggactgtttagtctgaagaaagaaaaccaaagagcagaatgatttgcaaacagatgcaacatgactatggcggggaggatctgccactgtctggcttcattgagggtagagcaagcacaagaaagctgccgctgccccatgaatatgcacacctactatgtgcccacaaaaacaataaagtaaataagaaagctgccgctgccccatgaatatgcacacctactatatgcccacaaaaacaataaaataaagctgtcactgccccatgaatatgcacacctactatgtgcccacaaaaacaaaataaataagaaaaaaagctgtcactgccccatgaatatgcacacctattatgtgcccacaaaaataaattaagctgctgctaccccatgaatatacacacctactatgtgcctacaaaaataataaataagaaagctgcaactgcatgaaggcaagcagggagcgaagcaagatgggactggtgcctcctctgggccaggcgcttttaggactttctcttcttttcttttttttttttaagattaaagacagtacatttttttcttcctgataattttttctgcttttataacaggaacgtgattactgtgtaacatttgaaaaatgctacagcttataaagaggaaacty

SEQ ID NO: 93949 - DNA, 13080 bp, Homo sapiens
actacctgacttcacactatactacaaggctacggtaaccaaaacagcatggtactggtaccaaaacagagatatagatcaatggaacagaccagagccctcagaaataatgccatatatctacaactatctgatctttgacaaacctgagaaaaatgagaaatggggaaaggattccctatttaataaatggtgctgggaaaactggctagccatatgtagaaagctgaaactggatcccttccttacaccttatacaaaaatcaattcaagatggattaaagacttacatgttagacctaaaaccataaaaaccctagaagaaaacttaggcaataccattcaggacataggcatgggcaaggacttcatgtctaaaacaccaaaagcaatggcaacaaaagccaaaattgacaaatgggatctaattaaactaaagagtttctgcacagcaaaagaaactaccatcagagtgaacaggcaacctacagaatgggagaaaatttttgcacctactcatctgacaaagggctaatatccagaatctacaatgaattcaaacaaatttacaagaaaaaaacaaacaaccccatcaaaaagtgggcgaaggatatgaacatgaacagacatttctcaaaagaagacatttatgcagccaaaaaacacatgaaaaaatgctcatcatcactggccatcagagaaatgcaaatcaaaaccacaatgagataccatctcacaccagttagaatggtgatcattaaaaagtcaggaaacaacaggtgctggagaggatgtggagaaataggaacacttttacactgttggtgggactgtaaactacttcaaccattgtggaagtcagtgtggcgattcctcagggatctagaactagaaataccatttgacccagccatcccattactgggtatatacccaaaggattacaaatcatgctgctataaagacacatgcacacatatgtttatagcagcactattcacgatagccaagacttggaaccaacctaaatatccaacaacgatagactggattaagaaaatttggcacatatacaccatggaataccatgcagccataaaaaatgatgagttcatgtcctttgtagtgacatggttgaagctggaaaccatcattctcagcaaactatggcaaggacaaaaaaccaaacaccacatgttctcactcatagttgggaattgaacaatgagaacacatggacacaggaaggggaacatcacacaccggggactgttgtggggtgggggggaggggggagggatagcattaggagatatacctaatgctaaatgacgagttaatgggtgcagcacaccaacatggcacatatatacatatgtaacaaacctgcacgctgtgcacatataccctaaaacttaaagtataataataataaaacttaaaaaaagactccatgaaaaaaactgttagagctgacaataaattcagtaaagcttcagagtactgaatcaacatgcaaaaatcagtaactttatatatgtcaaaagcaaaaaatctgaaaaagaaattaagaaaccatccccatttataatgtctacaaagaatacaaaatacctagaaatcaattgaaccaaggaagtgaaagatttatacaaagaaaaccataagacactgatgaaagaaattgaagaggacacaaaaaaatagaaagatattccatgttcatggattggaagaaataatatcattaaaatgacaatactgcaccaagcaatttacagattcaatgcaaccactatcgaaataccaatgacattcttcacagaaatagaaaaaacaattcaaaaatttacatggaaacacaaaggccccaaatagccaaagacgtcctgaggaaaaacaacaaagctggaagcatcccacttcctgacttcaaaatttactacaaagctatagtaacaaaatcagcatggtcctagcataaacagggacacagaccagtggaacagcatagagaacccacatgtaaatttatgcatttacagccagctcatcttcaacaaaggtactaagaacatacagtggggaaaggacagtctcttcaataaatgatgctgggacaatgggataactatatgcacatgaatgaaactgagggagtggggcggagctgagatggctaactagaaacagctacagtgggaggcttccaccaagaagaaccaaaacagcatgcgaatcctgcatcattaaccaaggtatccatgttctatcatcaggactgactaggtgtttggtttgacccacggagagcaaagaaaagcagagtggtgcctcagcccacctgacagccacatgggacaaaggcagcccccacctgcagccaagggagacggtgagcagtcgtgctacccagcctgggaaaccacgctttttccatggatctgtgcaacctgcagatcaggagatcccactcatgagcccatgccaccatcagggccttgggtcccaaccacagagctgtgcagattctcaatagccattcagctgcagtctgcctaagacaactgagctccacggggaagggacagcagtcatcatgcagctgcctaaaatgactaaactctggggaagtggtgggggcaggagccagcgggagaagggcagcagctatcactgcagctgcagagcaccatttttcccctgctggtgctggggaaactggatggcttggacccaagaggtattccccacagtacagcacaccacctgtggcagatcacagccagattgcctctttaggccagaccctgacacatccctcctcactgggcaggacctccctgcaggaacttcagcaactctagccaggggcttagagacagaactgtgatctccctgggcctgagcccctagtgggtggggtggccatggtctccatggaccagcagacttagtctttccttccgctagctctgaggaatatgagcagaccagacgagtgggtttccccccagtgcagcacaccccctccaccaaggggcagccagcgtgctttattaagtgggtcctggatcccatgccccccaacaggggtcaccggacaccttatacaggagcattcctcttggcatcatgtcagtgaccctttaggacagagattccagaggaaggagcaggctcccatctttgctgttctccagcctccttaggtaacatctccaggtgcgagagggacccaggtgaatagggcctgaagtgaaaccccagcaaaccacagcagccctacagaagaggggcctgttaaaagaaaaacaaacagaaagcagcaacagcatcaacaaaaaggtcttcacaaaaacccatccaaaggtcagcagcctcaaagatcgaaactagacaactcatgaagatgagaaagaatcaacgaaaaaacgctaaaaacttaaaaagccagagtgcctcttctcctccaaatgatcacaacacctctccagcaaggggacagaactgggcagaggctgagatggatgaattgacagaagtaggcttcagaaggtgggtaataacaaacttcactgaaccaaaggagcatgtcctaacctaacgcaaagaagctaagaaccatgataaaaggttacaggagctgttaactagaataaccagtttagagaggaacaatatgacctgatgaagctgaaaaacatagcacgagaactttgtgatacaagtatcgatagctgaatcaatgaagcggaagaaagaatatcagagcttgaagactttcttgctgaaacagagcaggaagacaagattatggaaaagagaatgaaaaggaacaaataaaacctctgagaactatgggactacataaaaagatcgaacctatgatttattggagtacctgaaagagacagaaagaatggaaccaagttggaaaacacacttcagggtatcatccaggagaacttctccaacttagcaaaacaggccaacattcgaattcaggaaatacagagaaccccagcaagatactccatgagaagatcaccccaagaaacataaccatcagattctccaaggtcaaaatgaaggaaaaaatgttaagggcagccagagaaaaaggccaggtcacctacaaaaggaatcccatcagactaacagcagacctctcagcagaagccctacaagccagtagagagtgtgggccaatattcaacattcttaaagaaaagaatttccaacccagaatttcatatccagccaagctaagtttctaagcaaaggagaaataaaatatttttcaaacaagcaaacgttgagggaatttgtcactgccaggcctaccttgcaagagctcctgaaaaaagtgctaaatatggaaaggaaaaaccagtaccagccactgcaaaaacacactgaagtgcaaaaaccaatgacattttgaagaaactgcatcaactagtctgcaaaataagcagctagcatcattattacacgatcaaattcacacataacaattttaaccttaaatgtaaataggctaaatgtcccaattaaaacacacagactggcaaattgaatagagtcaagatgaattggtgtgctgtcttcaagagacccatctcatgtgcaaagacacacataattgtctttgcacatgacatgtctttgcacatgtctttgcacataatttgtcaagctcaaaataaagggatggaggaatatttaacaagcaaatggaaagtgaaacaaaagcaggggttgcaatcctactttctgacaaaacagactttaaaccaacaaagatcaaaaaagacaagggcagtacttaatggtaaagggattaattcagtgagaagaactaacaattctaaatatatatgcaccctatttatgcatatatttatgaacacagattcataaaacaagttcctagagacctacaaagagactaagactaccacacaataatagtgggagactttaacaccccaccgtcaatattacacagatcatcgagacagaatattaacaaggatattcaaaacttgaactcagctctggatcaagtggacctgatggatatctacagaactctccatccaaagaaaatagaatatacattcttctcagtgccacatggcacatactctaaaattgatcacataattggaagtaaaacactcctcagcaaatgcaaaagaactgaaatcataacaaacagtctctcagaccatagtgcaatcaaattagaacccaagattaagaaagtgactcaaaaccacacaactacatggaaattgaacaacctgctccgaatgactcctaggtaaataatgaaattaagagagacatcaagaagctatttgaaaccaatgagaaaaaaagagacaatgtaccagaatttctgggatgcagctaaagcagtgttaaaagggaaatttatagcactaaatacccacatcagaaagcaagaaagatcttgaattgacaccctaacatcacaactaaaagatatagagaggcaggagcaaacaaagccaaaggctagcaaaagacaagaaataactaagatcagagtggaactgaaggagacagagacatgaaaaacccttcaaaaaaaatcagtgaatccaggagctggttttttgaaaaaaattaataaaatagatagaccgtgggcaacccgcttgggtccccttccatgctgtggaagctttgttctttcactcttcacaataaatttgctgctgctcactctttcagtctgcaccaccttttaagagctgtaacactcgccgtgaaggtccgcgggctcattttgaagtcagcgagactatgaacccgccagaaggaagaaactctggacacatctgaaggaataaactccagacacaccatctttaagagctgtaacagttaccacgaaggtccgtggcttcattcttgaagtcagtgagaccaagaacccactggaaggaaccaactctggacacagcaggacgtgagacttctagtgctcactcagaatcatttctgcaccaaccatggccatctttgtggagctcaataccaaagccaagatgcccattgtgggcctgggcacttggaagtctcctctcggcaaagtgaaagaagtggtgaaggtggccattgatgcaggatatcgccacattgactgtgcctatgtctatcagaatgaacatgaggtgggggaagccatccaagagaagatccaagagaaggctgtaaagcgggaggacctcttcatcatcaacaagttgtggcccactttctttgagagaccccttgtgaggaaagcctttgagaagaccctcaaggatctgaagctgagttatctggatgtctatcttattcactagcacagggatacaagtctggggatgattttttccgcaaagatgataaaggtaatatgatcggtggaaaagcaatgttcttggatgcctgggaggccatggaggagctggtggatgaggggctggtgaaagcccttggggtctccaatttcaaccacttccagatagagaggctcttgaacaaacctggactgaaatataaaccagtgactaaccaggttgagtgtcacccatacctcacacaggagaaactgatccagtactgccactccaagggcatcaccattatggcctacagccccctaggctctccggatagactttgggccaagccagaggacccttccctgctggaggatcccaagattaaggagattgctgcaaggcacaaaaaaccacagcccaggttctgatccatttccatatccagaggaatgtgactgtgatccccaagtctgtgacaccagcacgcattgttgagaacattcaggcctttgactttacattgaatgatgaggagatggcaaccayactcagcttcaacagaaactggagggcccgtaacatgttgcaatcctctcatttggaggactatcccttcgatgcagaatattgaggttgaatctcctggtgagattacacagggaattctctttcttcgctgaagtgtgacatctccactcaagtcctattttagccaagcttatctgagatcacagtgacttcgtcctgttgcaggccagaatcaaggtgctgttttagacatttatttctgtatgttcaactaggatcagagtatcacagaaaagcatggcttgaataagcaaatgacagttttttccacttatctgaacaaatgtctgtctgtcaagcaccagaaactctgccaacactgaggatgtaaagataaataataaaaaataatgatcgtaaaaaaaaaatagaccgctaactagactaatgaagaagaagacagagaagaatcaaatagacacaataaaaactgatgaaggagatatcatcaatgaccccacagaaatacaaccaaccatcagagaatactataaacacctctacgcaaataaactagaaaatctagaagaaattgataaattccaggacacatacatcatctcaagactaaaccaagaaaaattcgaatccctgaatagactaataacaagttctgaaattggggcagtaataaatagctaccaaccaaaaaaaaaaaaaaaagcccaggaccagatagatttacagccaattcaaccagaggttcaaagaggagtgggtaccattctttctgtaattattccaaacaactgaaaaggagggacttttctctaactcattttatgaggccagcatcatcctgataccaaaacctggcacagatacaacaaaaaaagaaaacttcgggccgatatccctgatgaacattgatgcaaaagtcctcaataaaatactggcaaaccaaatccagcagcacatcaaaaaggttatccactatgatcaagtcagctttatccctggaattcaaggctggttcaacatacacaaatcaataaatgtaattcatcacataaacagaactaaagacaaaagccacacaattatctcaacagacgcagaaaaggccgttgataaaatttaacatcccttcatgttaacaactctcaataaactaggaattgatggaacacatctcaaaatattaagagccattcctgacaaacccacagtcaatatcatactaaatgggcaaaagctggaagcattccccttgaaacctggcacaaaacaaggatggccctctctctttctcaccactcctattcaacatagtatggaagttctggccagggcaatcaggcaagagaaggaaataaaaggcattcaaataggaagagaggaagttaaactgtctctgcagacaacataatcctatatttagaaaatcccattgtctcagcccaaaagctccttaagctgataagcagcttcaacaaagtctcaggatacaaaatcaatgtgcaaaaatcacaagcattcctatacaccaacaatagacaaacagacagccaaatcatgaatgaactcccattcacaactgctacaaataaaatacttaggaatacagctaaaaagggatgtgaaggacctcttcaaggagaactacaaaccactgctcaacgaaataagagaggacacaaacaaatggaaaaacattccatggtcatggatagggagaatcaatatcgtgaaaatggccatactacccaaagtaatttacagatttaatgctattcccattaaactaccattgccgtttttcaaaaaattagaaaaaactactttaaaattcttatggaaccaaaaaagaccccatatagccaagacaatcctaagcaaaaagaacaaagctggaggcatcatgttacccaacttcaaactatactgcaaggcaatagtaaccaaaacagcatggaaccggtaccaaaacagacacatagaccaatggaacagaatagagatctcagaaataaggccacacatctacaatcatctgacatttaacaaacctgataaaaacaagcaatggggaaaggattccctatttaataaatggtgctgggaaaactggctagccacatgcagaaaattgaaactgggccctttctttataattcatacaaaaattaactaaagatggattaaagacttaaatgtaaaaccaaaaactataaaaaccctagaaaaaaatctaggcaacaccattcaggacataaacaaagatttcatgacaaaacatcaaaagcaattgcaacaaaagcaaaaattgacaaataggacctaattaaatgaaagagcttctgcacagcaaaagaaactatcatcacagtgaacagacaacctatggaatgggagaatatgtttgcaatctatccctctgacgaaggtctaatatccagaatctacaaggaacttaaacaaatttacaagaaaacaacaaaaaaccccatcaaaaagtaggcaaaggacgtgaacagacacttctcaaaagaagacatttacgtggccaagaaacttatgaaaaaaagctcaacattactgatcattagagaaatgcaaatcaaaaccacaatgagataccatctcatgagtcagaatggcgattattataaagtcaagaaacaacagatgctggcaaggctgtggaggaataggaacacttttacactgttggtgagaatgtaaattagttcaacaattgtggaagacagtgtggtgattcctcagggatctaaaaccagaaataccatttaacccagcaatcccattactgggtatatacccaaaggaatataaatcattctattataaagatacatgcacacatatgtttattgcagcactattcacaatagcaaagacatggaatcaacccaactgtccatcagtgatggactggataaagaaaatgtggtacatacacaccatggaatgctctgcagccataaaaaggaacaagatcgtgacctttgcagggagatggatggagctagaagccattattttcagcaaactcacacaggaacagaaaaccaaataccgcatgtacaagtgggagctgaataatgagaacacatggacacagggagggaaacaacacacactagagcctatcgggggggcgttgggagggagagcatcaggataaacagctaatgcatgtggggcttaatacctaggtgatgggttgataggtacagcaaaccaccatggcacatgtttacctatgtaacaaacctgcacatcatgcaaatgtatcccagaacttaaaataaaataaaatttaaaaaaagagggaatgaaactagacccctatctctcaccatacacaaaaatcaaatcaaaatggataaaagacttaagtctaagacctgaaactatgaaactagtattaatagaagaaaacattggggaaatgctccaggacattggtctgggcaagattttctgtgtaagacctcaaaagcacaggcaaccaaagcaaaaatagacaactgggattttatcaagataaaagtcttctgtacagcagaggaaacaatcaacaaagtgcaaaaacaacccatagaacgggggaaaagatctgcaaactacgtatctgacaaaggattaataaccagagtatataaggagctcaaacaactcaatggagaaaaaaatgacaataatctgatcagaaaatgggcaaaagagctgaacagacatttctcaaaagaatacatacatggctggacatggtgtctcaagcctgtaatctcagcacttagggaggctgacatgggaggatcaactgaggacagaagtttgagaccagcctggaaaatatagcgagaccttatctctacaaaacaaaaaaattaaaaaattaccaatgcctgtagtagtcctagctacttatgaggctgaggcgagaggatcacttgagcccaagagttcaaggccgcggtgacctatgatcactccactgcactccagcctgggtgacaggatgagaccttatctttaaaaaaaaaaaaaggtgatgatatacaaatagcaatgggtatatgaaaaaatgctcaatatcactaaccatcagagaaatgcatatcaaaactacaatgagatatcatctcaccccagtttaaattgttcttataaaaaagacaagcaataactgatgctggcaaggatgtaaagaaagggaagccattatacgcgattggcaagaatgtaaattagtacagccactatggaaaacagtatggaggttcctcaaaagactaaaaatagaactaccatatgatccagcaattccactactgggtatatattcaaaagaaagaaaatcagcagggcatggtggctcatgcctgtaatcccagcactttgggaggctgaggcagatggatcatttgaggtcaggagtttgagaccagcctggccaacatggtaaaaccccatctctactaaaaatacaaaaattagccaggtgtggtggcacacgcctgtgatcccagttattcatgaggctgagtcaggagaatcacttgaaccagggagctggaggttgaaatgagccgagatcacaccattgcactccagcctgggcgacaaaagtgagtctctgcctcaaaaaaaaaaaaaaaaaaaagaaagaaagaaagaaaagaaaatcaatatgccaaaaagatatatgcactcccatgtttatcaaagcactattcacgatagccaaaatatggaattgatctaaatgctcatcaatggaagaatggataaagaaaaagtggtataaatattatccagccataaaaaagaatgaaatcctctcatttgcagcaacatgtatggaactgaagttcattatcttaggtgaaataagccaagcacagaaagacagatattgcatgttctgactcatatgtgggaggtaaaacagtggatcttatgaagatagagagtagactggtggttaccagaggccaggtagggtggggggaacagggagatgaaaagaagttgattaacgggtacatatttacacctattcaatagtttaatagaagaactaagacctagtttttagataaatcagtagggtgtctatagtctacagtagtctattgtacatttcaaaaaagctagaagagaataattcaaatgtttctagcataaaaaagacaaatatttaaggtgatggatatcctaactacaccaatttaatatttacaaatcatgtattaaattatcatatgtacctcaaaacaatgtacatctattatgcatcaataaaaataaataattttttaaaaggcaagtaacaatattttcaaaacactaaaagataaatgaagtagcaatacatgctgtaacatggataaaccttgcaaatgtgctaagaaaaaaatggacacaaaaagccacatattatataattctatttacataaaatgtaataggcaaacagaatatagagacagaaagcagattagtgattgcaggggctgaggaaagtggggagtgaagagtggttgcttaatgagttcaggttttcctcttgggctgataaaaatgctctggaatatacattagtgacagtaacacaatattatgaatgtaatggaaaccactgaatcatacacttgaatggttaaaatggtgaattttacctcaatataacaaaagtagaaaaattatcatgtacacagttacagctatgtaaaaaaatatatataagtataggggaaaggactaaaagaatagtttttaaaagacttaggtgggttgaggtttttttctatttttcaaactttttattaacatcatattgttttcacaacaaaaaaagataattatcatatattgagtacctactacatattaagcactgtgctaggcattttgaatcaagagtgttttccagcctgctggataaacagaaaacatctgacagaaacatggaatagagcaaatgtatctagttctagggggaaaaactgaatgccttagttatctattgctgtatgacaaactatccctaaacatggcagctttaaacaataaatatttagcaaatatctctgtgtatttaaaggcatgggcatagatgagctctctaaggtcaacgtggtggttaatttta

SEQ ID NO: 93950 - DNA, 55829 bp, Homo sapiens
tcacccttctcattcctgatacttgtaatatgtatttttattctctcttttttttcccgataagtctggctagagttgtaccaattttattgatcttttcaaagaaacagcttttggttttattgattttctccagtgtttttctgtatttggtttcgctgaactctgctctgaactttatttcctttcttttgattacattgggtttaatttagtcttctttactctagtttctgttttttaaattttttctttttaaaaatcatcttcccccattctgagatcactttcttaaggtagaagctgaggtaattaatttgaagtcattcatcttttctaaygtaggtgttatgtttttttgttttcattttcattcagttcaaaatattttctaattttccatttggttaattctttgacctatggcttctttagaagtatgctatttagttcttacatatttggagattttccagacatctttctgtcattaatttgtaatttcattcatcatagcatcttcctcaaattgcattggtctggccaggtgcggtggctcatgcctgtaatcccagcactttgggaggccgaggcgggcggatcacctgaggtcaggagttcgagaccagcctgaccaacatggagaaaccccatctctactaaaaatacaaaacagggtgtggtggcacatgcctgtaatcccagctactcaggagcctgaggcaggagaattgcttgaacccaggagatggagattgcggtgagctgagattgtgccattgcactccatcctggacaacaagatcgaaactctgtctcaaacaaaaaaaaaaaaattgcattggtctgatgttttcctcattattaaattcagtttatgcaattttaataaaagtatctcagaaatgatgctgtattcttattccttcccatcacatgatacacaatttcactttttcctattgactaattctgattttctccttttggtaattatactgtcctttcctctgccggcagtgagaaacttgccttccactcttcttaatatactgtatttactgaacagatcaaccctccatgccaggctgcccctctcacatgaacaccctcctcaccctgcgctggctctgacattccatcctgggccactccttccccctgcagggacactctctgcaccctgctcaggctctaacacctcaaacaagcccaccccacgtatggatgccctcctcgtcctgcatgagtgctctcctcactaatcaggctctgacacaccatagcaatgccctcttcacccactgtggcctctgactccccacactaggccataccaccccatcatggatgcccttttcattacatttggctctgcctcttcacttgcatggcttcctcttcccccaactatggtgatcttactttactccacctaatagtttaaagatgaattttttgggtgatagagaaaaggagagggaagagaaggtgcagtactttttaaaaaagtctctggctattctatggagaatagactagagcggggcaaagagtacagcagagaaaccagttagaaggcatttgcttaggtaagaaacaatggtgacagggactgggatggtagtggtgataaggtgaaaagtggtcagattctaaaggcagaacagacaggacttgctgatggattggatgtagggtgtgagagaaaaacatgggtcagccaggcacggtggctcacgcctgtaatccccgcaccttgggaggctgaggtgggcagatcacctgaggtcaggagtttgagactagcctggccaacatggtgaaaccccgtctctactaaaaatacaaaaattagctgggcatgatggcaggtgcctgtaatctcagctactcgagaggctgaggcaggagaatcgcttgaacccaggaggcagaggttgcagtgaaccaagatcgccccattgcactccagcctgggggacaagagtaagactgtctcaaaaaaaaaaaaaaaaaagcaaagaaacaggaaaaggtgggccaatgatattcctgggcttttggcctttggcctaagtgactggtgctagttacctagttagggaagataagaggtggatgcagggcatgaaggaatcagaagtttagttttggacatcttaagtctgaaaatgacagagaatagagatgttaaattggtgacatagtatggatgtgtgcccccacctaaatctcatcttgaattgcaatcttcaatgttagaggtggagtctggtaggagatgattggaccacggggatggatttctcatgcatggtttagtaccctccccttggtactgtcctcgtgacagggagtgacttcttgagagatctggctgtttaaaagtgtgtggcacctctctcctctctctctttttttctgcttgggccatgtgatatgcctgctcccccttcaccttctataatgattgtaagtttcttgagacttccccagaagctgagcagatgccagcatcatgcttcctatgcagcctgcaaaaccgtgagccaattaaacttattttctttataaattacccagtctcgggtgtttctttatagcaatgtgagaacagcctaacacaattggatattccaggtcagagctcaaggaagctgagagctagagatataaattcaggggttcttagtatttagataatttttaaagtgatgggattggttgatttcactgaaagagtgagtatagatggagagaacatattcatctaattttagagttcagagaaaggagggataggatccagtaaaggagacagaggaggaaaatcagaagtggactgtcagaagcccagtgaagagaatgacttaagaagagagagtgatacaatgctgctgacgggtcaagatgagagcattagttttggcaatgtgggagatcttaaaggcaaggataccctctaaatgcagcaagccaggaaaactacagaagtggcctgcctgtgccactttggcaaagaaaactagggaagagaggggagagaagaggaggctagggaagagagaaggagggccatttggagctgtcgtttccacctccttacaccccaccaactgctctatctgaaggctgagggctggacacctcaatgctggcacctgatttccccaagtgccttgggcttctctgacagtagtgatggtgttgtttagagatgcagaaaccacttcatccattgctctgagagagtcacgttctattcttcaggaagcatgcttacaacaccaacctaatttttaaaaaatctttcagaggccccttttttaagatgcaaaaataatggagccacctatgcaaatagtggtcagctaccttttgggaattcctatacactttccttgtttgttttttgtgacttttccagaaagaactttgaggaaataaagaaataaaaaatgagaagtaaatggtattttgtgagtgactttctcaacacattctctaagaccaatgcagatatcccgaggtacctcacagatgggataggaaatcagtgctccagagatccagaatccttcttttctaggctggttgagtagagctctttgtccatgttgttgcagaaccatttttgtagccatccccagtggtgttgtcacctagaagaaacttgggggagctttttacccacatagcaccctcaatctccccagcaaatacagcttaaagaagttctagggccaggtgcagtgactcatgcctgtaatcctagcactttgggaggctgaggtgagagtatcgcttgagtccaggagttcaagatcagcctgggcaatatagtgagaccctatctctacaaaaattttaaaaattagccaggcatggtggtatgtgcctatagttcctgctaatctggaggctgggatgggaggattgctcgagctcaggtggtcaagggtacagtgagccatgatcacactgctgcactccagcctgggtgacagagcgaaaccccatctctttaaataagaaagaaaagaaagaaagagagagaaaggagggaaggaaggaagaaagttctcaagacaacccttttcaacagagtgctaccctaagtgcatgtgctatgggctaaattgtgtcttccccccaaattcatatgttgaatctgtaacctccaatacctcagaatgtgactgtatatagagatagggcctttaagaaataattaaggttaaataagatcataagggtgggtcctaatctaatatggctggtatctttataagacaagggaaggacaccagggatgcaggcacacagaggaaagaccataggaacacataataaaaaggtagtcatcttcaagccaaggagaaggggcttcaggagaaaccatacctgctgacatcttatcttggacttctagcctccagacctgtgaaaatgaaatatctattgtgtaagccacccagtctgtggtgttttgttatggcagcccttgcaaacaaatgcaacctcccgcaaggaattgatggtgtgccattgctgcccctgcattcgtaacaggaatacaagtgggcagctcctgctcacagctcctgacaaacgtggaaaccagacacatgccccaccttcccttgggtagcatgtctcttcccaaagaatcttagatgagtcaggtgcagtgactacagcaaggaagaaracactatctctaggaaggaatggggttccaggttttgagcaaatctcacttctttctccaaaacagacattctttttatgcaggtgaaattacactaaagttaatatcagtcttcattaggagaaaattgaattaggataattaagtcttgaagaagaaaattaagccaaaaagaataatatggcagatacttgtggaaaggaatcttttttactattgattttgatatttgctcttaagttttgtatctagaacaaataacttgtggactattagtctggttgttttccataggagccttctgtgattttttgcagccctagttcctgacctgagctacctccatgtttacttctctaactcactgagtttgacgaacctgttgtttcccattacttagaggtactttattcatctgaagggcctaggaaagggaggcaagtttaacttcaatccaattgcatctaatttacaaattctgaactggaaactgactgaagaaaatgttgcactttcatttatgtccctgtgtgcctaaataaaacagcatccctcaatccatgctaacacatatattttctaggtgaactggacaaagttatactacttgttttatctaaatctgatttttttagaaaagggaaagtgttgcgatcgtgaactccacgttgagatgtcaggaatagataatttactgcatagttttaggagcactggactgaaagccaggggatttccctcctagttcttctatcctctggggctcaaactagtcttttgtcaaatgcctacaagatgaagtccatggattctttctttcaacaaatatctttttgccaagcacgttcaaggctttgctctttccagctgaactattctagaatttccattattttaaagcaactcttcagagtgtttagccccgagttgcaccccatttcagtttttgcaaccccatcctccagaagctcagggactactgaagagacatgaataacgctcctcaaagtaagtacaaaatgttacaagatagatgatgaattgtcagaacgtactcaaaagccaaaacataccgcctggcccaaagcagtaaaagacgaaaggcagggacccagcggtccycgcacccaccggccactgagcatagagcagtggcaagctcgcgcggcsgagtgggaggcgcagagaccgaaagcactgcagcgccagagcgcgggctgaccaggctggcgtgaccgctttcccgacgcctgccacgccccgcggcggcctctttaagtagcggagccgcgggcggggccggctggcgttcacgtgacccggcgtcattggctcgctcgcggaagtagtcctacatycgcggtcagcgcggggtctccgggcgccctgcagggcgggcaggctgtgccatcccgccggacgtcgggatggtgcagctgtacaacctgcacccgttcgggtcgcagcaggtggtgccctgcaagctggagccggaccggttctgtggcggggggcgtgacgcgcttttcgtggcggcgggctgcaaggtggaggcgttcgcgrtggccggccaggagctgtgccagccgcggtgcgccttctccacgctgggccgggtgttgcgcctggcctacagcgaggctggtgagtaatctagagagccaggggccgcctggggtccagcttgaggcctcctagctagcggaccgaacgtctgggctgtagctctagctagggatgggacttcttgcttcccggaatttgccggatggtctccctgggtctggccgctgattgcttgaagtcgcattgagctatgcggttgtcgcggcaagcataggtatgagcttgcttctgtcggggcggagacgctgacatctcttmgtcttggttttctgcagaaaggcctctggctggattccactcatctcggatacttaagcaaacaacaacaaaaaactctttagtgcatcagatttcaaagacttascaaaaaaacaagtaggaataaggagactagtactgtatcccggaacctccaagtactcccagctttaacaattattccaactcttggcagttctttcacatctgtacctccatctacttccggtcggtttttgaaagctcacattatgtgttgatttttaaatgtgtgtaagtagaactcagactgcccccctctcttctcttaaacatctgtggccgggcgcagtggctcacgcctgtaatcccaacactttgggaggctgaggcaggcggatcacgatgttaggagttcgagaccagcctggtcaatttattgaaaccccgtctgtastaaaaatacaaaaattagccggacgtggtggtgggcgcctgtagtctcagctacttgggaggctgaggcaggagaatcgcttgaaccggggaggcggagattgccccattgcactccagtttaggcgacagagtgagactccgtcccaaaacaaacaaaaacaaacagttgtaagagcagccgttactctttcacaccagaaatgtgaagcaataccaaggaaatactgtgtgggtgaatcctattttagaaaaatccaacatttaaaactagatcccttttagattacagaagaatttaccatataattcctttaatacacttaccttcgattcatactttacaagatgggtgtaaagttcagtatttacgttgcaaaagctggtggctatgctattaatgaagtggagaacttgaacctggaagattggagatctctctctaatccctaccccgcagctggttcggtgtgagtttatagaaaccttggggtctgagtttatgttaaaaaaaaaaamaaaaaacaaaaagttgaataaatagatcagtgatatccagaccctgggatttcgtggctcaattaaaaactgtggggttaccatacatagtatctgactgcttattttgtcaagtaaagacatatacaggcataccttgttttttttgcatttcactttgttgtactttgccgatactgcgtgtttttttytccccaattgaaagtttgtggcaactctgtgtggagcaaatctaccagttccatttttcacactgcatgtgctcactacatgtctcttgagtcacattttgatagttcttggcaatatttcaaactttatcataattattgtatctattayggtgatcagcaatctttgatgttactattgtagtagttttggggtgccatgaactgtgcccatgtgagatggtgaacttaattgatatgtgttgtgtatgttctgattactgctctgatcgtctctgcctgctcaggctgccctaggccctgagacacaacaatattgaaatcaggccaattaataaccctacaatgtcttctaaatgttcaagtgacacttggacgtctctcactttaaatcaaaagctagaaatgattaagcttagtgaggaaggcaggcgtgtcagaagctgagataggctgcacggtaggcctcttggaccaaacacttagccaagttgtgactgcaaaggaaaagttcttgaaattaagtgttactccagtgaacacaaatgattagaaagccttattgctgataggaaaaaaactttgctctaggtagaagatcaagccagccaaaatactcccttaagcccaggcttaatacagagcaaggccctctgttcaactctgtgaatgctgagagaggtgaggaagcagcagaakaaaagtttaaagctagcagagttcagctcatgaggtttaagggaagaagctgtctccataatataaaagtgcaaggtgaaacagcaagtgatgatgtagaatctgcagcaagttatccagaagtccagaagatatagctaagatgagtttatggaggcagctgtgctaaacaacagattttttcagtgtagacaaaacagtcttaaattggaagaagatgccatctaggactttcttggctagagaggagaagataatgcctggcttcaaagaacaggctgactcttgttagggggtgatgcagctggtgactaaattgaggccagttctcatttaccattctgaaaatcatagggcccttttaaaaattatgctaaatctactctgcctgtgctttagaatgaaaaaagcctgggtgacagcacagctgttacaacattgtttactgaatattttaagcccactgttttgatctactgctcagaaaacaatattcttttcaaaagattactgcacattgacaatgcacctagtccctcaagacctctgatggagatgtagaaggagattgatgttgtttttatgcctgctaacacagcatccattccgcagcccatggatcaagtagtaattttgactttcaagtctcattattaaagaaatacatttggtaaggctataactgccacagataagtgattcttctgatggatctgggcaaaataaattgaaaatcatctggaaagaattcactctttctagatgccattaaaaacattcaggattcatggaaggagatcagataccaacattaacaggagtttggaagtagttgattccaactctcatggatgactttgaggggttcaagacttaggtggatgaaataacagtagatgtagtggaaatagcaagaaagctagaattggaagtggagcctgaagatgtgttggaattcctgcaatcttatgatcaaacttgaatgggtgaggagttgcttctcatggatgaacaaagaaagtggtttcttgagatggaattgtttctattgaagatgctgggaacattgttcaaaagacaacgaagatttagaatatttcataaacttagttgataaagcaatgagaaggtttgaaaagattaactccaattttgaagttctgctgtgggtaaaatgctatcaaatagcattgcatgctccagagaaatcttttgtgaaaggaagagtcaattgatggagcaaacttaattgttttatttttttattttattttattttattttatttttttgagacagagcttcactcttgttggccaggctggagtgcagtggcgtgaactcggctcaccacaacctccacctcccaggtttaagcaattcccagcctcagcctcccaagtagctggggttacaggcatrcgctaccacttgtggcgaattttgtatttttagtagagatggggtttctccatggttggtcaggctggtctcaaactcccgacctcaggtgatccacccgccttggcctcacaaagtgctggcattacaggtgtgagccactgtgcccggcccattgttgtcttattttaaggatttgccacagccaccccagcctccagtgaccaccaccctgatcagtcagcagccatcagcatcggggcaagacccttcaccagtgaaaagatatgtctcgttaaaggcttggatgatcgttagcattttttttagcaataaaatatttttagttaaggtatgtacattgctttgtttttttgtttgtttgttttttaggtataatgcaatttcacacctaatagactataatctagtacaaacataacttttttatgcactgggaaaccaaaaaatttatgtgactctttttattgcattatttgctttattgcggtggtctggaagcaatcctccaatatctctgggatatgcctgtgtttttttttaaaaaaaatgaaaagccttactatttactgtcattatttataaaagaaaaaacacttagcatcaaacattggatatctttagctttgtgaacaacttactctgctgtcattggttttttgtttttgtttttgcctaatgacaacattagcaggggcctgcactgggccacggacctgtttgaaaaacctctcattaactctttaagttccctttcagcaggaatattccaattttggtattataaaatctgtctttaatggtcatacctgttaaaatattggtagttttctctacgtcactccttttaaggcataagagttctcactttcaagagttctactgagtaacaaactcaccactttcaacttttatatgtgtgtgtgtgtgagagagagaaagaaagacagggacagacaggcatacacacagacagataatatgtttacatgatttacttcattcttccaagtggatgtttattttagaatttggagtggcaggtattatgtaaacttctagctttcttacctgtcggatccttggatggccactacctatgcatacgaatcacttggggagtttttaaaaatctctatgcctgggccaaaccctcagagatacagtagtagtttccctggagtgaggacagcattggggtgagtcagatatttaatcaggrttgagaaccgctgatctagagcagtactggctgcaggaggccatgagtagcattgtaacctcattaacgaggccttgaacaataaagatgtttttataatccagttggctgccttacagcaggttcaagagtcatgtgggatggaattagcatcacgggtcatgtagctcaagggtaagtttcagtccacagcttgaacttcaacccctgggtacagctcctattaatgcacccacaaatgaacataaatagagctgactctggctatgatggtatccagataacttgttttccacttcacagcttttcccttttggccccttccttccattcacaataactgggacatgaggattccggctcaatgcccagtgtcctcctctgtagcaagtctcctcctcaaaaatggaaagaatcttacatcagccatctatgtttactaaaaatgcttttcaggtctctactcaagcagaaaacattttcaggttaaaaaaaatctcaaattagctgaaagtttttaaaataaaatttgggggtattagggagaaagcaggtagaaattttgaaggatggggacctctgacatcgtcatcagtaagggaaaataaatttaggctttgtgtgtgatacggtttggctgtgtcctcagctaaaatctcatcttgaattgtagtccccataacccccacgtgtcaagggcgggaccaggtggaggtaattggatcatggggacagtttcccccatgctgtttctcatgatagtgaattctcatgagatctgatggtttttaagtgtctggcatttcccctacccacacttattttctgtcctgccgccctgtgaagaggtgccttccaccatgrttataagttttctgaggtccccccagccatgcagaactgcgagtcaattaaacctgttttctttattacccagtctcaggtatttgcttgtagcagtaatgtgaaaatggactaatacagtgtgtaaagcaaagaagaggggagacctgagaactccycactcctgaaagagaaagacctggtggccagggttgagtgctgtatggggacctttggtggtagacacttgtttatggggtgtctaggggtggtggggcatggaggatgcagaccacaaggctgtaattgcctggccattagcacaagtgtactaaaccagccccagcccatctacccctcccacaagccctactttctctcagttttcctggagtcataaaacatatttagatgccttataaattatttctgccttgtgattcaattttgtcataggagtacagcctttgatctggtattactgttagccatgtttgtgatcttgctacataaaagggaaagtttacttatttttaaaaatcagtaactctaagctcaagagtaaaaatgagaatgatttttcaatgtacttaataaagacagaagctgagcctgggctacatagtgaaaccctgtttctacatatgtgtgtgtgtatatatatacacacacacattataatatatgtatatacatatatatatacacacacacacacaaattagccaagtgtggtggctcacacctgtagttccacctacttgagaggctgaggtggaaggatcacttgagtccgggagrtggaggttgcagtgagccaagacaacttgggcaacggagcaagacacttaaatttaaaaaaggtaaaatgaggcactgcacacataaagcttaaaaaatttagttyccttctcttktaaagggttatagcctccacagactcctgtagagttgtatttcccttctatcagttggggaaacagcattactgggcaaagaacataaacttttgagctaaccagatctaggtttgagtcccagtttcctaatttgttcgttgtgttgccttggacaagttactttgcttgtctgtgcttcagattcctgatgtataaaatgaggagggagatttgtatcttaaagggctgttgtgagagttaattgaaggaactctaaagctctgatcataaggattgtcaggcaggcacatttagcaagtgctggatcatcatttaaagaccaggtcattaatctgaaagcacacaatacaacatggacactatctacaatttgcatactataaacattagttaatatatgaattttatagatgaaatgggcatgtatttataggtatatgaataaaaaggttttattgtaattaaatattcttagttttaaaatttatttactaaattatgataccaaaagtataggcaacagaagaaaaatagataaactagactttatcaaagttaatgactgttgtatatcaaaagactcatcaacagattgaaaagacaacatggaatgggagaaaatatttccgaatcatatatctcataagggattaatatctagaatatatacaataaagaactcttacaactcaacaacaaccaaaaaaacttgattaaaaaatgggctaaggacttgaatagacatttctacaaagaagaaaatacataaacggcaaaaaacataagaaaagatgctcaaaatcactgataattagggaaatgcaaatccaaaccacagtgagatagcacctcacacccattagtatgcctgttattaataaaacagaaattaacgtgttggggagaatgtggagaaattggaacccttaaacgttgctggtaggaatgtaaaataacacagcctatgtggaaaacaatatggcagtttctcaaaacattaaacatagaattaccatatgatccagcaattccacttctgggtgtatacccaaaataattgaaagcagggacttgaatggatacatgcacaccaatgtttgtagcaaaattattcacaagagccaaaaggtggaaacagtccaaggatccattgacaagtaaatgagtaaataaaatatattgtatgaacatacaatagagtattatttggccttaatgaaattctgatgcatgccacaacctggataaatcttagagaagttatgctaagtgatacaagcctgatacaaaaggaaaaatactatatggttcaacttacatgaggtacctagagtagtcaaattcatagagatagtataatggtggtctcaccctggggagarggaggaatagggaattattatttaatcagtgcagagttttttagtagatgaaaaagttagttatagagatggatggtagtgatggttgcatagcaatgagaagataccagtgccactgatctgtagacttaaaaatggtgaaaatgtacattttatgttgtgtgtatcgtactacaataaaaaaaatttatttatttactgggggaattttaggaagatggaggcctcaacttcatcccaactctgtccaaactgcttccctggaaaagtgaacaaacttagggcacctgcaggatctctttaggcattctacgatctccagggaaagaacaggttcaggctccatctctgtggcataaaaagaaccatcatcaggagaaagcttgctacctgtagaagtcaggatcattttggaggagggagcctggtcagcccagtgaatgtctgcagaaaggggcagcacctgtttgcttgcctcataagtacatgggaagtcaatgtaatggcagcatttcaayttcaattcatcggaaaagggccaatttgcttaatagtgttaatataatagagtctacatttggaagaagtgacattagatcctctgacttatctccttctttacccgcaaaattctaaagattaaaaatgtatattttctaaacctccactaaaatagaagaaaatataggagcatatttatgtaatttggaggacatggatgggaactcagaaggcaaggaggaaaagatacatatagtatactctaaataaaaagggtatggtaaaacatgccatcagcaaagtcaaaatcagaaaatagactctaaaaccatttactatttatagacgacaaaaggtttatatcccttttaagtagagagctacagtgtcatgataagaaaaacaaatgaacaacttaataaaaattggacatcatgcagaagagaaactatacatggctgataaacgtaggaaaagatggccagctttataaaaaggtctaggaaatgtaaattataatagccgtgagagtccatgtttctctcattgtgtagagtcagtgctagtgaggatgtggggaaacaggtgtgtttaagcactgctgctggtaacatgaatttctattatctaattgatagtaattgggcaatattgaaatttaaaatgcccatgccctttggcccaacatatctcacttttgggaatctgtaccgttaaaataaatcccccagtaaataaatatatagatataagcctatgtattactatgaaacatagtggcaaaaaaccctggaaatatatttgaatgcttatcagtaagggaattattgaataaattatgcgtatgtatgtacatatgggatgttgaacatattgaaaaggatgttagatatccatgtatcagcctggagggagagatttattaataatttttaaaagttgcagattgttaaatatatttaatatgattacattttagtttttgttcatttttaaaaaagacagaatacctctctgtgatctctgtttatatgagagaaaggtgttgaaaggcacataccaggctgtgtgttaacattgggtcctcaagggggagatcattatgcttttcattttgcatctctttaccacgttaccattttgacttcccacaaccaatatatgtttataagttaaaacttatacaatcaacaatttagagaaaattaacttggatctgtattttctttgctatttccaactttatcctgtttctcagacttgtgacttgtgggaaggagagggtttgaaatgtaaattctgctaatctgagaattccttaatgtatacctaattttggtgtcaccctaatagtgaattctgtgtcagtagagctttgttagaactgcagatttagagctacagtaaacacttaattttacattttattccttatatgaactttctgtatgttacatgggcaattaataggttgtcttaagacactcagatgggagagattgcatttcagaacctcaaagcctaatgtcagtcaaaaatacacctaagattttgttacttagggttttattctattcagtctttaattcgaccatttgtgttagaattcattaatagtactcatgtcagcaagggaggtggttgtatttctaattacaaattctcagtataatcttcattccttctcaggagattatttggtagcaattgaagagaaaaacaaagctacatttctacgtgcttatgtgaactggagaaataaaaggactgaaaactctcgtgtgtgtatccgaatgattgggcataatgtggagggaccattcagcaaagccttcagagaccagatgtacattattgaaatgccgctttcggaggcccccttgtgcatttcctgttgccctgtgaaaggagaccttctcgttggctgcacaaataaattagtcttatttagtttgaagtaccagatcattaatgaggaattctcactattggactttgaacgttctttaattatacacatagataatatcactcctgttgaggtttctttttgtgttggatatgttgctgtcatgtcagacttagaagtcttaatcgtaaaactggagtcaggccctaaaaatggagagagagttcaccaccatccacataagaccaacaatcgaataagacggacagaagaaggtaaataatgaatttgacttgctttcttgttttaggaatatagaaaacyttcacctttggcagtctgaaggtctgtggtatatatggtgcccggccatgttatttatagatttagttattcctatttcatgggatttggttttatgatctggctgtccatagcttactctgtagcatgtgaatatatttatcagtagaagtaatggaacaaccactgctagatgaggggcttctagtcctagtcctcatagttactagttgaatgacyttgggttamtaataccatctctgagtttcaacatcctcatttgtaaaatggggatgataatacctaccctgttgtactttatcagttgtggagattaaatgagcaagtgctaagtcttttcacaaccacagtgccttgtaaatgtgtgcatattataaataaatgaaattactatatgtctaattggtgagaggatgttgtaaaatctaattttcattcaagcaggactgttacattttatttttttaaggcatcagtaatgaaatttcacagcttgagtcagatgattttgtcatctgccagaagcccctggaacttcttggtgaaaaaagtgaacagtctggattatctgttacactgragtctacgggattagctgatgaaaaaagaaaatattcccactttcagcacctgctctataggtattatagtgctttttttttttttaccagcattttatgtatatatgcctgcttaaagtacatggaagttatatttttccctttctctgtctttttaaacccacagacgttttgctcctgatatttcgtcctatgtcttgtctgatgacatcaagctacattccctccagctgctacccatttaccagaccggtaagcrtgacagtgcaggagtgygacagtgcagcaaggtgaaaatgctctgtctgggctgggagtgaagacccatgtgggtaataggtttggtggtttggttcttccactggagtctccttgtggccctttaacaaagtttttttttttgtttttttttkkttttttttttgagactgagtctcgctttattgccagtctggagtgcagtggtgcgatctcggctcactgcaacttctacttcctgggttcaagtgattctcctgcctcagcctcccgagtagctgggactacaggcgcccgccaccaagcccggctaaatttttttgtatttttagcagagacggggtttcaccatgttgggcaggatggtctcgatctcctgactttgtgatctgcctgtgttggcctcccaaagtgctaggattacaggcatgagccaccacacccgacctctattttattattatttattattttttttcttgagacagagttttgctcttgttgtccaggctggagtgcaatggtatgatcttggctcactgcaacctccacctcccgggttcaagtgattctcctgcctcagactcccgagtagctgggattacaggaatgccccaccacgcccagctaattttgtatttttagtagagatggggtttctccatgttggtcaggctggtctcgaactcccgacctcattgatccgcccacctcggcctcccaaagtgctgggattacaggtgtgagccaccacacccggcccaaaatccttagcaaatacctatgagtactagaaagggaagtcatacctgctaggagaagccatggagaaggcatgacagactgaactcatttccctttttgaaatggcctctaggcccaaaaaggaaattggagacctgttagagccaaggtatgtgtgggttctagctgggtatttggccaagcttcttatgattggcttgtgaattaggtgtaaaaatgtggactgaatggaaaataatttagagcagttgttttcaaccctgccacacaatgggcttacctgaatgctttttaagatattgatactcaggctctacatgcaagatatcagttacagggcctgggcattagtattttttaaaaactccccaagagtctaatgggcaccatgattgagaatcactaataggccctgcactcagttctggcctgattaacatctttagatgttatctagagaaagatacaaatattattccgattaaatgtgtttctaaccttcatttttttttcttttagtaaatatttattgagtacctactatgttgagcattgtgctgaatactagggaactaacagtgagtgaagtgcttgctcttacggagctaattgtctagtgggggaagggagacattcgaataacggcagattcacagttgtaccctgaaatgagtgatctgtggtaaacctccctgtgacagcctataacaaaagaccctgacctcatcttgaggtcagggaaggcttcctgagaaagaggatctgaagggcgaattggactcacttgggaatagggttgggttggtgcaggggaggggaagagagccttccaggcagaagcagcagcaaaggctctgttgcagagggaggatcacatctgagaaactgagagaagcaaaactaagggggctgcagtgagacagggctggagaccagacagggccaatagccatattagagggtcagctaaagatccagtgagcttcccatagcacttggaataaaaactccaaatccattccatggcgtatatgaccttaactctaagcccatcktgtcccactctcaccctgcttactattcttcatccatagtggcctttccctcttccttagagacgccacaggcacgcttatctaagacctattatttgctcttcttgtgcgtagggtactcctctcagccttgtgtgactggtgcatttaagtcattcagttcgcagctgaagtgtarcttcatgacggaggacttctctgacctctcaatttaaaatatcccttctccactcacactgsagtttacttgtttactctccatcccaatccccatcactagaatgaaggctctgtgaaagcagttacgttgttttgaacactgttgtatccctagaatctggaacagcagcacttagtaggtacctgatgaatgctgactgaatagacgaatggatgggtcatatgtatttgagctgggccgtaatggatgatagagattttggaaagatattacataatgggaaccaacattatatgaggtgtaaaattatgtgtatttggagattcgtgagcagttctctttggccagagcacagatatatgttaaaaaagaatagggagaaaaaaactggacagttgactttcagccaaatatggagagtacagaattggacttctgctattaattggtgtccttcaagggtgtcagtcagggtacttgttaaacaactttggttatgaaaaattacagccacatgtagatagaaaatagtgcagtgaacccccacgtacccatcaaacagcttcaacagtgttgctccatgctacattattttgatgcacatcccggagttcataccattgcattcataaatatttcaacatatgtctctaaaagtattcttttacttaaacccaaaatgctatttcacattataaaaaatttgttgccgggtgcggtggttcacgcctgtaatcccagcactttgggaggctgaggtgggtggatcacaaggttgggagttcgagaccagcctggccaatatggcgaaaccccgtctctactagaaaaaaaaaaaaaaaaaaattagccaggcatggtggtgggcgcctgtagtcccagctacctgggaggccgaggcaggagaatcgtttgaacccgggaggtggaggttgcagtgagccgagatcgtgccactgcactccagcctgggtgacagagtgagactccgtctcaaaaaataaaaataaaaaaaattttgttgataccaccagatatccagtaagtgttcacatttctctaattgactaaaaaacttctgtaattcatttgtttgaatcatattccaaataaagttcatacattgcaattgattgctatgtcttttaaggctcttttaatatctaggctttccttcctctcttttctttgcatcttatttaacaagaaattagactctttactgtaaaatttccaacaatctgaattttgctaagtgaatccttacgtgtcatttaacatgtttctctgtccactgtatttccatttgagttggtagatggaaatctatgctgtttagtatggtagccattagtcacatgccgctattaagcacttgaaatatgactagtctgaattgagatatggcataagtataaaatacacactaggttttgaagactaagtacaaaaatgtatataatattaatttttgtgtttattgcttcttgaaatggtaatatttttgatatgttgggttaatacaatattattaaaattttacttgtttctttttacttttaaaaatgtgattactagaaatctagtaattgcagatgtggctcacatatttctatcaacattgctggtctatactcaggcttgctcagattatttattattctttttattattttgaaacccaagtagtgttgagctctgccagtggactctttttgtgatgttaacagccattgatgatcattacttagatctgttaatttagtaggggttgtacaatgccgatattctaattatattactccttttttatttcttaccaacattcttctataaagagcaacttcccctttgcaactctttggttacccactgatacagtttgcatagcaaagtcaatatatgattatttccccctttattyactggtttcatggtgttttatttctttcatttttgcatgcaggttctcttacrtctgatggaaaaaatttgtctcaggaaaaagaattgctgagtctcttttgctttttctccttacctcatgtgggctatctctacatggttgtcaaatctgttgaattgatgtcagtctaccagtatcctgaaaagtctcagcaggcagtactcacgccacaatttttgcacgtcattacaaggtactgttagagggtcacttgctggcctgtgagtcacttatttgtaaatttttgaggtactkcctaaatctgtgagaattgtgtgaactagcatagagtactataaatgcatgagttacatgtcattgtaagtctgtcttttgatgacccatacctgccttttcaatgtcaaagatttagactctggttttgtctttgtttgtttccctagactggataggggtccctgtaaggaagtataaggttcttcataaaggaagactttcatagggagttttaatgaaaagtcaatgcagccagtcagagcgtctctttaagtttctttttagatttcctaaattttttttctcactgctaccatatttttctagtataaattgagttatttataatagtttagaactgtgaaggggccagagagatgatctgattctctccttgattggcacagatagggaagttgttacagagaggttagaattggccaaagtcatgtgctaattggtggcagatgtgttgagttgccttcccctattatgctggcatgtaaactgggttcacaagcagtagcttgatttcatttccttttaatctcagcagcatatgatggttttggttctatttcctgttttttgagcttagattatgttcagggcacttccttgtgccctctgaccatgcaactgtgaataagatacaccaaccactttctaaagcaacaatagaagagaaggttagagagacacacaagagtcacagacactaggagatttgcgaaaaatgtcttaagacctcatgaaagtgccattgacattgggaggagggaagttacttctggctaagttgtatggggaagttgtggatagctgattgtgtttgaagtgaagcatgaaagctagctagaattttggtagatgaagattgaaagagatgtgcattatagattgaaggaagactataaacaaaaactgtatcaagtttttaggaacatccaaaaattaattgcacaggacagagatcaccccaccactgagtggtagtatcacaatctctagcaggtgctggagattccaaactgcatagaaccaatctggagattctgatatccactcttagtggttgcactcccttctccacctgatttctggcttaaggagaaatgctgctgatggcagtgtgtttcttaagtgaacaatgtggaggtagctactctttccagtgtccaaagtgttgtgtagtgatgttctttaaatatgaagaagctgaaaagtagacaggtggtgaaaacagtgcttgaaaagagagctcaaggatttgaaaattaaactaaggacttttttttaaagttttaaccagagaaagtaatatgatcagaacattgttttaggaaaattaatggtggctgttgtggaagatggattgaacatagataaataagctattggaatagttcaggcaaggatattaaggggcggtattcaggcatggtagtgttaatgaaaggagaagggaggatgsatgggagaggcttcagtgggaaagttaaaagacttgtctgatgggataatggggakgtaggaggcatgaaaaatcccaccaaggttttgcctgcttttatgaaacaatggaggctggtgaaatgtggggcaaaagagatgtttggtttagacatttgagtttgagatgcttatagattatcaagacataatgctaagtaggcttttggacacatagaactgtagattagggtaaagaggaaagcttagaagttttactaccgccaaaaaaaaagttgattattaaagtagtgagagtatgtagatagtgaaaagttattaaagaattaaactctggtgaaggtcttgctcagcaagcaagaggagaaagacaaagatttttaaggatgcagaagaatctaggaaactataccatctcagaaacaatggaaaaagggaaaagaaaggaatatactaatttctgtcccatcatatagatgtaaaagactatccatctttttcccatctgattgcatatacttgaagtacactgagaatttagtgagtggacccactaaatctgttgccccatctctcttatttataagttatgtacatatttggagtgtagagccctgaaagcattatattatgggtttgaatggacttgtaatgcgtgggttttgactgcctccagayaggacatttttgagcttttcttattatcagcactaaaggagactgacatcattaacttcactgtgaaaccattagacattagaatagcagttgttttatgtaaattcagattcttaataagaatctccactcctgtttttcaaatcaaatcggagtttytcttttgttgcccaggctggagtgcaatggcgcggtctcagctcactgcaacctctgcctcccgggtttaagcaattctcctgcctcarcctcccaagtcgctgggattataggcacctgccgccatgcccgactaatttttttgtatttttagtagagatggggtttcaccatgttggccaagctggtctccaactcctaacctcagatgatccacccgccacggcctcccaaagtgctgggattacagatgtgagctactgcgcccggcccatcttttttattttacccgatagataaatgtttcaaaatctcttgtcccataaggtggtcttgaaaagtttctggaagataggtatacgcctaaagaaagcaatagagatttttttaagaagcaaagaacaaaataaaatcatgtaaaatgccaactttatagaaacgtgtaagtaggaaagccccccatgaaatcctattctcccagagttaagcatatcaagactttttttttttttttttttttgagatggagtgtcgctctgtcgcccaggttggagtgcagtggcgtgatctcagctcactgcaacctccacctccctggttcaagcaattcccctgcctcagcctcctgagtagctggggttacaggtgcccatcaccatgcccggctaatttttttgtatttttagtagaggcggggtttcaccatgttggccagactggtctggaactccagacctcaggcaattcgcccacctcagcctcccaaagtgctgggattacaggcatgagccaccatgcccggccattttttttttkttgttgttgtttttacaatgcatgtactactatgccttatttattacagaaattgatcatgctctgtccactgttcagcaacttgctattttacatagcagcatatcttggacatctttcaatgccagcacatttcagtttattctttctctagtatacatttctgcttaggattccaacagtagccaatagactggattcctayaggtggaggtaagtcagggaaccctgccttttttttttttttttttttttgagacagaatctcactctgtcacccaggctggagtgcagtggcacgatcttggctcactgcaagctccgcctcccrggttcatgccattctcctgcctcagcctcccgagtagctaagactacaggcrcccaccaccacgcccagctaattttttttttttttttgtatttttagtagagacggggtttcactgtgttagccagggtggtctcgatctcctgacctcatgatccgcctgtctcggcctcccaaaatgctgggattacaggcttgagccaccacgcctggccgaaaccctgcctttttatctctaaaatctaaaggctatttgtttttgcggtcatagctattctcatctgtccttccggtcccactgcaggtrcttttttgcttccctctctctcagtttacttcccaaggttgctaactctactccagatttgtaagtggtagtgctactgtcctagttattgtcaggactccagaggtcatttcctagaacgttgcagagatagacagagatggctgaggctgaagtggaagcaccagcagatggagagaggcctgactacctcttaaattgtgctaagcctcctaactgaaaatatcagaatgcctttttttatgaggacattttttaaatttaatattactgttaggtttgctttagtctttttttttattttaaagagttcgtttttacttctcccactttctagtttttttaaaaagggagggagaaggaaggaataaaaatatcaatttctgtcccgtcacataatggaacagaaatatacatcattgtgtagcaatttctaagttaattaactrtttttaatgtcaatattcgagggttgacctagataacaaccacagatgacaaccaggcatctattgtgcacttactgtggagtccctaggtcctttttgtatgcagaagcagcctggagttgtggaaagaggtagaggagtgtgaggggtcaggagacctgggatctaattggctctactctccagagaggcggtggaccagtcatgaacctttcatgccccaatctttaaaacaagctgctggactaggtaattctgaagatgccttcagatggtctctcattttcaattcgaccattggatttgagtttgcatagtctgtgttgtccagcataatccaggatggatttcatcatgaggtggttgaggaagaacaacagttaagaaatggattttamtcttggttttgatagacacccrtctgtaccttgggcaggtactgggggcatcatttgtctgtaaaatgaagatactgacccagatccatggttcctaactagggatgcacatcagagtcacatatggagttttgtagaaatgtacacgtccagattcagcccctagagattgsgattcactaggggtgttatggggaccagttgtrtatttttaaaaacacaccacagggattctgaggcattcctcttattgagaagmagtttaacttggcaatatttgacaaatacttgactgtcacccctgcccattgccctgtttgcctgtgaaaccctccctgctgtgggtatgttggttcttggcctcactttgctyagcagcctgtgtcttcctcctcagtaacaacctgcagtgtttcactgtgcggtgcagtgcggcggcagctcgtgaggaggacccgtacatggacaccaccctgaaggtaagaactggcttatgaagatagtgaaaccttaagatcacaagggagcacatgaatastcgtagatttgctctcagacctaagctaggcaagaacaaaagagcttaaggtygtctaatgtattgaattagaacttttggatgtaaaatagtgaggattttgtgattcatggcttagttgacagtttttaagattgctttgcaaacatttcactccgaattgatttagtgsatagtttttaaagtttggtaaagaatataaaaagtgtgaactgagagcagttcacaactactgtatgctacaattttattttttatttttttgattttaacttttaattttttcgaggcagggtcttgctctgtcacccaggctggagggcagtggcaaagtcatagatcactgcagcctcgaactcctggactcaagtgatcctgccacctcagcccctcaagtagctgggactacaggtgtgcaccaccatgccctgctgattctttttgtattattattattattattatttttttttctgcagagacaggttttgccgtgtcgcccaggctggtcttgaacttctgggcccaagcgatctgcctgcctcagcctcccaaaatggtgggattacaggcatgaaccaccatgcctggcccaattgtattttactaaatggaaatactggtggcagttttacagagctgttaacaaaacagtccagaaatcaatatacttaagagcacaaaattgaatacratgcattaaaatgatttatttatactattatcagctatgcctgtaattctgtattttataagcctttgataaccttctatacttaatckaagagttaatggttatggtagatcaataatctcatttttagtgagaagtaaagtgcttggtttytaaaaaaaaaaaaaaaaaaaaaaaaaaaaagcctcttgaccacagaataaatgtaggcattattatgttgagattcggkgttttctgactttgaatttctgttctcagaaatacactgatcatttacattatattgatctatgttattttacttctgaagtataagctatttgaattggatatttgttaggaatatacatgctgcaagaagctcccaaattatcatgctctgtgtttcaaaaattggtttatatctgtctggaaactggaatacctttttccagaaggataagccttcagtaatggtggttatcttaacaagccagccccgacttagtgcctaatgtgtctgagatactctttcacggtcactgtcacccaaactgtgtcatatgatagtgttttatggcaagcatggtctctgagttcctagtgaccctttttaatggcctgcctgtggttttctgttgctgaccaggcttactgcctgctgtcagcctcttgggaaaccagaaccacagatttcctgtgcctttgtttgtataagatacacacatggcctttttgagagattactttaaaatcaggattatttcctttgtaaaaatagaaaagtaacagattaaaaaaataaaacttccattctttgtcctcttctttcccctccttgcgttttcaaacctcagaaagacataggcttatataggggtgatggtgtaatttaaagtacctaatagattgaagtaggatcaatgtacctttggaaaaaaaataattccatgtattttcagagtcttataaaagrcagaatgaaggaacaaggaagagacaaaggggagggataaggagaggtgggcatctggtggaggtatgctgcccttgaggccagtggaggtaggagggggaaggcataatcacacctcacggttcctcctttcctgggactccaccagttctgaagccctaggtgccagttaaacaagcacacgtttagcccacctgctgactcaggctttggagctgtgatgtctgaaaaaagtttcacaacctcaagagtctggttgaaagtgcttgtggtctgtctccttttcctctgagattctgactcctcagcactaaccaagccaccttaactatttttacatggaggtaacaatgaagatgacctcagaatcaaaacagcatgcatggacaagaaggcagggtcctggcagcatcattttgtgagctcccagaatagagctcttccattagttttcttattcattctacttgaattaatggtcctttacaagagcaaaaggctggctcctctagtttacctgacatgtcccagcctgtccgccattccaggcactattcgtacctaacagactaacagtcaggggccatcggaacatacaagcatttctttcacacacacatccgcaaagaaaccattttatgtactctacaagcagtagaatgtcctttcatagtgtctggtttttcctaaaaaccccatttgggcgtacccccaaccatcctgctagttgtgggggtttccctgggtggcagagtaccagcttcatctcctggaggtatctgtggagccactctgtggggcacacacacaagttcctgcagctgtgggaccctctttccgtatttattcaatcaatcaataactgagtttgttggctgagtagctctatggaatacactattggttacataggtttagataacctcttctgttaagaataggaatttgggttggtcttttgtttgtttgtttgttttttggtggtggtgggtatgggatggtggcagcagaagagatttgatcaaataaactgactgatttttgaagattgaagtgcatgtacctttatttcttgcttaaatatgtgattttcctttactaggcttgcccacctgtcagtatggatgtctgtgctttaagaatacagcttttcataggcttgaaagccatctgtcactttaaaaaccacatcatacttttgactaaagcagaacctgaagccattccagagagaagacagtcacccaagaggcttctgtaagcatccccttgccccaggcattcctgccagtttctgraatgagttgtaactggtatattttgtgtttatcttttttcaaatcataacttggaatgatcaaatggcttttttatggtggtctttttccagagaaagaaaagaaggttctaacaatctctgtaatacactttataactgacctggaaacttttaggagaaaatggattataaaatagtttcagtaaaaatcaaaggtgtttyagattagttaaaggccatgcttttctgtgtaattaatgagaaagactgagcctataatgctaattgaaactacaggactttttactgtctttcttctttgaccctttcagttgttacatttttatctaaaattattttctgatattatgaaagaaattaataatgtatgtcttaccttaaagcacatttatgatctatagatatgtgctcatgtatctgaaaataaagttgtattttgataacattcatctcttgttatttattaggtttctgctttcccattgtttagaatagaatgcttaattccagactagttatgcytctatttgatgttttcctacttagtggtagagaatgcaatctaatttctctaaggaaaatttaatcaagaaagaaatctcttcagggagtgaagcatatagtgtatttcatatcaaacatrggttatttttaacatagatttttactttttcaaattgttagtggctgtgctttgttgcatcaacaggaatcagaggttgactttggtaactgatcactttgagtgtacacagagtggtctggggctgactgatcctaaaagctttctggggagaggaaaagcagtttgtagtcttgcacatttgacattctaatagtataattttttaaatgatgttttaaaaattctaattcatttgaaaattcatttgataaacaattataaaagattgtacactaaagaaaatgtatcacatagtgaaagcaagagataagatagtgctttaagcagacttaacagttttatgtgtcttcatcatattctcagcagccatgatgttgcttctgcttagatttgtggctcagggcatgctagactcatgaaagtcaaatgcagaaaagagcctgggtatagggacttccgcagtcaaggatcttttcctcttgatgggacttgcctgttctttgaacttactgctcatttgagaatacttgcagagtgaattggaagcagttggtttatcattacatgaaaattacagaatattaaatgcagttagcctatgtagtattgtgaactaatattccatagaaatagagtgtacagttaatcactgaggaaaatagtaaawgaaaatgattttatagttattttatatccaatatttaccatttacaactaccatttattaataatgtcattttaaaattcttgtcctttgttttgcttttagttcgagaaaagataccagtgttaaaatcaaaatacctcctgtagctgaggctgggtggaatttgtatattgtgaatacratctcaccagtgcarctgtacaaagagatggtactcttttcaaacttctgattcttgtttgtagatatttagagtgaaattaatgatcagaaattgattctaattatcatacattcaggatgccacagccattcagcttcctggctctgtctgacagtggaatgtatatctctctctgcctcctcattgttacagcttctgacatccgaggaaccagtagaaattcccttcactagcataagactcccttattcatacccactctcctaagaagatcgattggccaatctgaacatagtctttgaccttaatttgaactctagcaaagatagctaagaaatggagcaaataaataaataaataaataaawctaggattatgtatccctgtsccactcttcttatttagaaatgttagcacattgtcccagggcaccacagctactgcagcattgtcctggggggagggacccagagggagcatccttactgatctaagagtgacagcttcctactcatccctggcaattattttaactctttattttgaaacaatttcaaacttacagaaaagttgcaagaataagtatattcttcccaaccctttgggaggctgaggcaggtgagttgcttgaggccaggagttcgagactagcctgggtaacatagtgagatcccatctgtacaaaaaattaaaaaattagccagttgtggtggcacatacctgtagtcctagctactttggaagctaagatgggaagatcacttgagcccaggagttcaaggccacaatgagctatggtcgtaccactgcactccagcttgggtgacacagcaagaccctgactcttttgactcttttttaaaaaagaagaatattctatatattcccattccccacacagatttctccacagtcaacattttaccctatttgcttctctctctcttttatgcactctgtgctttctgtgcacacagatatacatacactgttttctgattcttcttcgggaggtaaactgcatacatcagtcttttgcccctaagtacttcagcgtatattttctaagaataaggatactctcttgcataccagaatacagtagtatgctttaataaatttaacattgacacagtgctttatctggtttatggttcatagtctaattttgtcaactgacccaatggcttgatagcatttccccttctccagttcaagacccagtctaggatcaggtagtgtgtttaactatgatgtctctttagcctcctttgaagctggaatatttctatagcctttcattatgttttatgacatgagcatttttgaaaaatataattttcccctctactttttttttgagagtattccttatttagggtttgcttttttttttttaatggttagattcagattatgcattttcagccagaatattgcataggtgatttttgtgttaagggtatcacatctggaggcacatgctgttcatctacccctctttggtgatgttaatttttggtcatcaggtcaaggtgttgcctgatttgtccctgccaataatttaatgccaattattatattmgctgtgccctgtcttttcagtcttgcttaattgaaagtcttcgtttaggtgatttgaccgctagagtctgaatatattgattgagtcagattagctagtgataatttttatgagccctctatgagttatggaaatagatgtagtagagcytaaacttaccaatcaaaactaaaataagggaagaatactcagtctaaatttgagaaagaattaaatcacaattttttgaagtttatttcaaatattaacatgttcactagtcttactgagatcaaattgttgctaagtttacagtattattagtattacagtattatttggacctctgtaatgattagagctgtttaacaaggtattatttataatcatgtatgtattaaactggctcatagatggtgggaaaaaagccctacagctaagcccttgtcagaatggtgaataaccattttgtttrcttttagggtttaatatgtccaaatgttaactttactaacaaaatatataaatgtttttaagaactcaggaacttttgagagtctctcttcagcaacattagtgtttgtcttttttgtttaggtagactatagcaatacctataagactgtcaaaacccagagctgcattcaccttctcagtgaggctcatctgttagtgcgagctgccctgatggatgccagtcagctggaacctggagagaaggcagagcttttggaagcatttaaggaaagctgtgggcaccttggggactgttacagcaggtgggtgacacctcttggaaccttgttacagaagtcatcttgaactttgggtacacttgttagcttttccatctctggtagttacctgataaatgggaaggtggttcatttattcccttcttccacaagcatttgttgagcacatactctgttaggcactgtgctaggcttaaacatacaaaaatgaatgtgacccatttcctgctctcaaggagtcacagtttagaagatgagcagtaagtctcaagtttgtgattttcccaccatttaacttaggactttgacatttttctcaagctttgaaaatccctgacattaaaaacatatattttgttagtaaagttaacacttggacatattaaaccctaaaagtaaacaaagtggttgttttccattctgacaagggcttagctgaaggacttttttcccaccatctatgagccagtttaatacatacatgattataaatactaccttgttaaacagctctaatcattagagaggtatgactagtttattgtctgctaccttaagggagagctgccagttggacagtctgtgattttgatctcagtagtcagtgcttttatgatatcagaaagggacactggtatgaataatgtttttatttttgagagtaatgtttacaaatttttttgcatatgattgttttcagacttacttgatccacatgaatggttaaaaattaataaaacagacttttcctcctataaacaccattattttagagtccgatcatgaatattagaattaacttaaattgttgtttttgtttctattatgagcaggcaaaaagaaactgcattaattagaagtttgtaagataaaacttaggagtttgtttcagttactaatggcagtagaaaagcattttggaatttctatcttctggaaagcatgatatattctgttatagaatgtkttagatatccaggtttaaaaattccaaatttgactaggcatggtggcttacacctggaatcccagcactttgggaggctgaggtaggataatcacttgaggtcaggagtttgaaatcrgtctgggcaacatagtgagaccccgtctttaaaaaagtgacaaatttgaggtttttcatttccttccctttaggcttgactcccagcattctcatctcaccttgccatactataagatgtctggtttgtctatggctgaagttctggcccgcacggactggacagtagaggatggattacagaaatacgagagaggattaatcttttacattaatcattcactttatgaaaacctggatgaagaattaaatgaagtgattatagttttctgttttctatctaatatttttaacatttcattttaatggtttattttatgtagtactgtttagaagtcagattccaaatatttttcttctttgatactctttttctaaaaaagtaatgtgaccttttcttcattaatgaagatagaattatagcttggaaaagaacttatggataatcttctcatactttctcattatacagacagggacatgtggtctgttgtagtctcaacacctgcccagtgacagtagcatgtcctcagtagagctacacagaatgcgggccttgccttccatcttctcatctgcagtccttcccgcaaccctaattgtcccttactccttgtgtcctaaacttcacttataaaactctgaccttaggccagtgacctaaagacattattaaggattatttttagggctgggcacagtggctagtatctgtaattccaacactttgggaggttgaggtgggaggatcacttgaagccagaagtttgagaccagcctaggcaatatagcaagatcccatctctacagaaaattaaaaaattagctaggcttggtggcatacacctgtagttccagctactcaggaggctgaggcaggaggatcgcttgagcccaggagtttgaggctacagtgagccacaattacaccactgcattccaggctgggcaatacagaaaaaccctgtcttagagagaaaaaagaaacgataacccctcatgtattttatacatagttggatgcaaatatgccacattagaaattgtggtatcaaatgttttaaggttttgaaatgaaattttctcatacaaattacttaattgggtatattttgaactaaatagtagtttttatgatggatttttattgtcattcaatcaaatgtttattttcttcttctgaagtgttaaaattagaaacgctggccataacctggtacatattttcattgctttttcttccttataatcagcaaagatcacttcaggttatctcaggcctcccatgtattagtatcagtytttgtctttttaaaattaaaacataatactataattttatcttacttggaatgtttgtgtcttggctttttgcacatatgttttgctgattttgttgctttcttctggctgactgaccttttattccttttattccttcgtgctcaccaaaggaattagcagcaaaagtggttcagatgttttatgtggctgagccaaagcaagtgccccatattctctgtagtccttctatgaagaatattaatcctttaactgccatgagctatctaaggaagctggatacttctgggttttcatcgatcttagtgacattgaccaaggcagcagtggctctgaaaatgggagatcttgacatgcacagaaatgaaatgaaaagccattcagaggtatggagctctgcccggtgctaacagaaggctgaaataggacctggtaatcctgaagtgtttagctgtcttctggcttctttctagcttatatattcttggttgtaatggaaaacagacaatattagaaacaaagtgatccaaatgggacttcggatctggcaaatgaaaaataaataagactgataaatgacagcagtggatatacaaagacttcaacttagtgtcaagtgcgttcagagcactgagcttggtactaaagaacaggctctgctccgaggggacgatgtgatctggcatgagggatatggtgtgtgcactggaaaagcagagtagtatgtatttaagaacagcaaaggggatattagccatgagctttaggagtctagtagttgcagaaatagcccccgcttgggaaaatcacagattaagaggattggacatttgaatggtataccaagaaacacaggctttcccttggaaaagaggtcatttagggacactaccaaaggtgttaatcatttaagcgaagaaaataggaggtagtgtaattgaacacttattatttaccaggcctattctaagctccttgcatatatcatttaattcttaatactgctatagggtaggagtattatacaaatgaggaaattaagacacagagaggttaagtaactcatcaggatcacacagcagttaagttgtagagccagaattgaatcgggcagcctgatttcagaatctgtgctcctgcactgttttcttgccagactggccaaagcccacagtatgacttgggttgctaaaaaaggaagaacgtaagtgctttatcactatacaaatgacatgctttgttatgatgaggagagcaagtcaacatcggaatgtcttctgttttgaagagtagaattctagaaaaatgaattttatcttcataattttgaaaaaacttaagatatattagtcatcacttggtatttatgggagattggtttcagaaccttctacagttaccaacatccacagaagctaaagttgcttatataaagtggcatagtatttgcatataacgtatctactttytccaatatacttcaaatcatctctatattacttataatacctaatataatgtcaactgctatgcacatagttgttaatactgcattgtttagggaataataataaaatctgtacatgttcagaacagaagcagttcccccacaccctttttttttttttttttttttttgagagcctcgttctgtggcccaggctggagtgcagtggcgcaatctcagcttactgcaacctccacctcccaggttcaagcgattctcctgcctcagcctcccaagtagctgggattacaggtgtgtaccaccatgcttggctaatttttgtatttttagtagagatggggttttaccatgttggccaggctggtctcgaactcctgacctcaagtgatctgccctccttggccttccaaagtgctgggattacaggtgtgagctactgcactcagccatcccgaatatttttgatctgtggttggttgaatccatgggtgtggaacccacgaatacagaaaattgactgcattttcaaatcaagtagacctaaatataaagctctctacaaaaaataggacaccttgattcttagttaaatgttagtaacttctgtaagacagtcagtggtgtcctttggataagaactagcctttatagtcaaagaaaaaattgtgattaaattattaatagcttaaccatgcattgtgaatgcactagcatgtttagtatttctaaratggrcaatctaaatacaatgtaccttttgttcctaaatttctttcttatctgaagatgaagttggtatgtggcttcattctggaacctcggctgttgattcaacagagaaagggacagattgttccaaccgagcttgcacttcacttgaaggaaactcagcctggattgcttgtggcttcagttctgggcttgcagaagaacaacaaaattggaattgaagaagcagattccttttttaaggtttgtcactttgaaaatgtgatttttctggatggcctyattaaattggtggtggggagggamagaataagagaagtgagtttttcatttgtttgtttattgaaaaaacagacatacataatcagtttataagataaaagtactaattaaaagactatatctgtagaaactttatttgtacatcctagaatctgtttccttttaaaaatgtctaaatttgcttttgccatggcgctaatgctaatggtaaattattgattgcgtggcccatgtgatgctgtgatattcagcccagctgtcgctttatcagtgctatatttatctggaatatagaggctccttttactgtttttaaggtgctttgtgctaaggatgaagatacaattcctcagctcttggtagacttttgggaagctcagctagtggcatgtctcccagatgtggtacttcaggaactctttttcaaactcacatcacagtacatctggagattgtctaagaggcagcctcctgacaccacaccattgcgaacatcggaggatctggtaagataatggaataataccttaaatttaactcatgcattgcccattacaaaaacataccttatttttaataacttattataaaatctaacctagttttctattaccaggtatcttatttatgcaggagttaaaaatacacttaaaatttgtctttaactgaagtggcctacattttaaataattttgtactctaaagaatgtcctctacttattaatgtccctcacttaattgcagtggtagctcagttgccaaagcatggagaaagggacttcttccagaacatcacctcatctgtccttcctcagcagaggatcattaagtggaacataagagagaagacatctgcagacctccttggtgggagaggaactgcagaaggctgtgggagggagactgccttagtgggcccccatttcctgtctgttgcacatacaggagctgttctgtggcacttgaggcagccagtaacaactctttctacccttcttgctaccgttcttgctcctagcccatttctgtcctagctcattagccatggctaatggagggttaagtggagaagttaccagcttcttgaataagcagggcttcttggggattgtcttgagaatttatgaaagatattttgccttctaaagaaagtagtattaataaaaattatttccaatattctttttaggtataattggcttaaatgcagtattgctctttttgctagaaagtgcctctttggagtatttacattttaaaatataaggaaatatttagtgtagaagcaagcaagactgaaatattttccaggggaaaaattcttaaaaactttccttcccattcccaggaaagtatatacctaattctatgacatggcagagaattaatgattgctttgctctttgtggaatggataagcaagcttttgttgttatattttgtttatgagaaattcttttatgttttagataaatgcctgtagtcattatggcttaatttatccatgggttcaygtcgtaatatcatctgattctttagctgataaaaattatacagaagatctttcaaaattacaggtaagtaaaaatacctccttttcttatgaaattgcatattmcaatatagtgtaagattaaatttgctgagaccccaggtgtcctgttaatctagaatgtagaattytgagggacaaaatccatagttaggcatactcaggagacttggagggaatgcctgcctctgcctgaaactgatgatggttggaacacctgtgctgagcggctggttttgttgtaggtggatgaacgaacttcaccaagtctcctggctgatttcctcattttcaggatgggcttgaaaacactttgtgaaatgaaagtgtggcaaatgtttagtggtgtttttattgatgtagtttgtttttgttagtgttgacttacacattttaggtctctaacccaagccaggcactgctatttctcttataggaaacaggtcaaagtagttagtttatccagctcctgaaaaggatttttcagaaatgagggggatgattagagaatgtggatcatcctttaataattctgactgcaacagtgttttggctggcagtgagaattaaagtccacatttgacttggtggatcaggctgggccacatgagcatatgattttatttaatgtagttcagtggcccaaagaacgaatataattcccacatctgttttctttggtcttcccagtgtaggtgctaacatacaaaacttaagatttcctattaagaattctgagtttcaagtcactcttgaaaaatttagcagctccgttaacccaaggccctcattgcttctgacctgagggttggggctgacccgcagcccctccttgggcagtgctcacactgtcctcccgcacagttatcatctttgtggcatcctgacccaaatgctgagtgtctgttttccttatcctagctgccctcatgcatcttcatcatttgattggcctctttaggcttttgaatttgcaatacctcatttacactatgggaactacactataagtgtagttgttacttagtgtcaaattgggaatggggcttagaggagggaagctgaagaggccatattgctagatcagcctcaggtggggctgtggtgttcccagwgatggcattatttatgtgcttctttaaaaaataaccaaggtagattcttcttgtctcttgtctctagtactattgtgatacaaaggcttctgaggggctagcctcagattttgttcatttcacgaatattgcttgagcatgtgctgtagatgtatggggagcattggacaagacagatggagctttgccttcctagatcatacacactaattacatatttaaaattgtaattggaataagtgctattaaattttccctgataaagctttaaagcatatttataatcattgcttgaaaaagtataattcagtgatcttttaaaatttgttttaaaatattttaaaaggaaaatatttgctattaaaggaggaaaatctttgctattaaaggagcaaaatctttgctgttgaaggagaaacatagtctgcctaaacttttataatttttttttttagagagacagtctcactctattgcccagattggagtgcagtggcagtcatggctcactgtaacctccaactcctgggctcaagcaagcctcccacctcgggttcccaaagttctgggattacaggtgtgagtcactgcacctgaccttactttcaaacttcttgattacatggataaaactaagtaaaagttcatgggtagttgaagttatgactactttcatttcagtcataatttggtacacatgctttgctccttcctactgcccccactcccttccccattatctggattagtcaagagttaaatatagaggtaatctattttctcccatgttgggagaccttttgagtgagagattatcaaccttatttcatctctgccatctgattgtcaggaaattattcacatgaataatttattaaacttgcaggaagaaaaggtaccaaccttattctcctggtcattccttggtagatatttggaataaaataatcacactgactgtgattgggtagatcacattccatattctcctgtgagtctcagaagatgctgtagcaaaaagggtacagggacaagaaaattaggacatgaccatctcatctttatcctggagaaagggaaagtggagattattttggtggtagaatcaaaagtagtatttatagtttaattgcttgaagtaaatattggtaaagttgtaaattctgagataatactgctccctgttattcatcttgtgacaaagtggtattgataacaatgattagttctaaacaatcactttagtcttattaagtgttaaattttatttttgcatatgtatgtagcacatgcttatagaaaatttggaaactacaggaaggggtgtaaagaaaacaaagagtaggctttgttgtcccatcctgtgtgctgtttcaaattgccatgctcttccgacagtatttctgtatgtgcatttacctatgtagattttataaaactgatcatgttcagaatataattttgtattgaaatttttttactcattttatcataaactttttttattaactagcctttgaaaacatagttttgatggctgtgtaatgttccattatctgagtgtgccatatgtatttactcatcctttgttgttaaacatgtagattacttctaaattttcaatattgcgaatactcttgcrgtgaacatcattggacgtaaatctttaaccacaatgttgattattctcttaggatagagtcctaaagaatgcccrttggttttaatttgcagtccacacaaagcaaataaaatcatgttatttaaaaatgattgctttctattaaagagatctttaaactagaggtagtttcaagattatattatacttagatttattaaataaggaccacgtgcatgtgctctaatatggcattctttctattttatttttggcaagtgaggtttagtcttaagaaattgaattctgcatgttgtgttttagtttttgaggtgcctcatttcataacatttcacttttctgttcatagtctcttatatgtggtccttcatttgacatagcttccattattccgttcttggagccactttcagaagacactattgccggcctcagtgtccatgttctgtgtcgtacacgcttgaaagagtatgaacagtgcatagacatactgttagagagatgcccggaggcagtcattccatatgctaatcatgaactgaaagaagagaaccgggtatgctttttcagattatgtttttaggcttgatcagtrataatcagatytgataacctcatttcctttcctgcaaaatggggacaatttatgctaatccaacatcataaggctgtgtgggtccattgagcatatatgtttaatatgttacgtgttttgagkactattaaatgctgttaaaatatatggagatggtatattatcatcattaaacatcttttgtttggagatgaagtagttgattacctgaagatttgggaacagtgtatgatgggaaaatattttctctgccatacggtttttagtttagaaattagaagaattttggaccttagttcttttttttcttcattccttccttcttgccacataggagatgataacgggatatgtctgttacttcttgaaaatagccatgtacatatgtacaatatatgtattactgggttttcaagttacgaacctgacttttacgttatagttaaggcagaagactggctgctgatataacttatgttataacaaagttagctgccttagacaaaatgatgtatttttgctctgtgctttcctgcacaatcttcttattctcctttgaaatctgagaataaaatgcatcaaactaaaatttattcattttttcctaagatagactctgtggtggaaaaaactgttgcctgaactttgtcagagaataaaatgtggtggagagaagtatcaactctacctgtcatcattaaaaggtaaaatgattttttttttgcttgattataaacttaagtttcagttttaaatttggtgaagccttcttaagtattttcatrtgattctcaagtgaaaccgagggcctttcagaaccatctggggagcttattttcagcattcacgtaccctccccttgacatttgatattgatttatctcctagtcacagaactgatgttcttttaacttaatcctttcaaacacttaacaaattatcacagtcatagaaaatgacagcatcagtgttttaaaatgtgagtagtcattaaggcaattacatcttttatcaatgatcagagtacttaatttacttcatgtaggaagttaagatcattactattaaacataattataagcaagtattgatgaataacaacctcaaggatttaaaagttgagtatctaaattgtaccgtattttacagcatagtagttatttgaattttcataattcataatcataaatcttggtagatatgtaatctgtttctatactgctgtgtgttaatataattagttgttttcccaatgacaaagggtatgggtatatcaattgcagagcacataaaatattagaaattgacagtgttgaaattgtgttttccagccaagacagttgatttttaaaatgtaaggccgagtcagtggccactggagattatttttctgaagatccccctttaattaaagctgtatgcttgtgattgggaagggaaagggggawctttattctctgtcctacccgtctccctgattgctttaggttttcagaagatggaagtgtcagatgtctgattactttgccccacttgcatacactttacataatttatcactgactgtttgtgttagtggagcactttccagtacagacatcccacatctttacacctcagcatcatcattatcttaatcagaagactctttcttcatccttttctgatccacatccacacactccaccccaactcacccataatcattcctccaaatgttgcatttttctctgtcttcaaaatatatttgtgtgcatacgtgtgtgtgtgtgtgtgtgkatggctaatgagactaagtgccatgtgtgatttacctttattagactgtaatacctcaagagctggcatagtgttttattcattttttcaagctacacattcctcaccagcaatatgcctctcctataggaagcattctgtaactgttcattgattagaaagggagacagctgaagaactttargttcgtttcacagaagggtgttttcttaacagttgtacactgaaaagagccctgtactgggatctggagaattggaactgagttccaggtttgccacttactaagtgtccgagagcaacccagttttctaatgtcgtgagactaaatgagaagttcaggactgaatcaaaagttaaatgttaggcaaaattgcaagagggagaggttggagatgaagctcagggacttacatgcttaggagtttggatttcttatctctctaatacagcatttttcaaccttggtaattgtccgtgtgcgtgggggtttcccctgtgcattttaggatattaaacagtatccctggtctctactcattagatgccaatactactgcctcagttataacaaacaaaaatgtctccagatgttgccagatgtcccctgtgggacaaaattttcctggttgacaactgccacactaatgcagaaccattaaaatgggttagtggatgggttggttgttttagggaaatattcagtactgtttttgtaatgaaccaggcttattttttaaaattctggtactgtggtaaattacaaaaattaaatttaaaaatcatttaaaatcccaccatccagaaattttcaacctttgacaaatattttctagacatgctggaagattttaagggtacaggtttacatttagatatatcatttatatgtaacttgtagatttaggtagctggtgagtggagtagagcaagtaattttaaccttctcttagcctcaattttcccaaccctaaatcaggcctaatacccattagtttaccctatttgggatggggcttggattaaataaataaaaacctcaaaggattctagaaggaattaaagagaagttatacatgaaagtgctttattaatttttaaagtactctgtgaatttaagatattgaccttcttggagtgataacctgtattagcccctccttatttgggagaagaggagaattgggaagtggtgagatttttgttgactctataacaactccacactagctctccaactcagtttttttgtttctgagatgctacttacaggctccacatttaggtaagtaaactgctttgataggaaaacatcaataattcatatttttcacatacattttgcaagctagttagtagttgctgtttattaaggtctgattttatgtcagatgtgcatcattgtattttagcttaattttcacgggaactgtggaagctagcagacagtaccactacattataaatgaggaacctaggacttggaagattaagtgactttcttaaagccactcggtgagttggtggaagagtctggatctcttcccaagtctgtctggattccagaactaggaatcttttctataaaccattgctgctttattcattaactctttagcaacaaaggcagttcattcttttgtgtaaagaaaaatttaggttgctgtatattggacagatgactttggaatggatcttatatttcacttactctgcaaatagagtaagcgatgggcatgcaacgatcacacagggaatggcactgacatgtggatagaagatgtaagaccaagtggatgtttattgggaacattgttcataactgtcacccttctattccgggagagggcagcatgtatctgttaagaagctgtagaatcataaagttgcattttttttaatgtatgttacattccttaatatttaaaatgttcactggggccaggtgcggtggctcacgccggtaatcccagtgctttgggaggccaaggcaggcggatcatgaggtcaagagatcgagaccatcctggccaacatggtgaaaccctgtctctactaaaaatacaaaaattagctggacgtggtggtgcgcacctgtagtcccagctatttgggaggctgaggcaggagaatctcttggacccaggaggcagaggttgcagtgagctgagatcgcaccactgcactccagcatggtgacagagcgagactccgtctcaaaaaaaaaaaatatattgttcattagaacaccattgcagtttgggggaaaaggaagtaaatggtcgtgaaaacagatttgtgcttattaacaacatgaaatgttacgttaggaactaatacgggaaaacattggtgtttcttatcctatcaatctttataaattagcttagtatagacatagcattaaaaagaatattcaaatgattgtacttttctttagaggatagtagaaattgattgcaaaataatatagtaattcagcaatgaaataataaatccaaatttcatgtggctgatataaaataaccttcaaaggattctagtaaggaaaaataagttacaaccttattgaagcctatggatttaagagactgatttttttctttgaagttataacattttgttacctgaactggcttcttttttttttttttttttttgtcctgagatggagtcttgctctgtcacctaggctggagtgcagtggtgcaatctcaactcactgcaacttctgcctcaagggttcaagcaattctcccgcctcagcctcctgagtagctaggattacaggtgtgcgccaccatgcccggctaatttttttgtatttttagtagagacagggtttcaccatgttggccagactggtcttgaactcctgacctcgtgatctgcccacctcggcctcccaaagtgctgggattacaggcgtgagccaccacgcctggcctgaactggcttctaattggttggttaagtaagaagagattgaatgaaagacagactttcaattctaattcagatattcttttctacacagaaacattgtcaattgttgctgtggaactagaactgaaggatttcatgaatgttctcccagaagatggtactgcaacatttttcttgccatatcttctctattgcagtcgaaagaaaccattgacttaaaggtatcatttgaaaaataccataatggcatttgagactgaatttctaaaaattgaatgccaaagtacaagtagaggagttttttattttatatatwcacacacacacacacacacacacacacacacacacatatatgatacaaatgctttcaggctgcttaccttaccgtgtagtggtaactattcacttcttaatttatgacctcaatcaatttaattgtctagaatgtaaaaagtctttaagacataagaattcctcaaagaagccatacattttttaaggtggggattgacttttattccaaggaacaacatcagttcactgttgttggagacatgacaatcattttcatcccaagaacactttaaggaaacattttacaagtatgcttgaaagaatgtcactaactggtccagaattttatcttcttgatttttccagatttctctatgtttttgagaaagatgttaatgttttgccatggtaaaagatttcaaacctcattttttttgttccttttcttgktacttttaagaaaactcatgctctgtttctctgaatcaaatgaagtagaagtttacaaagctaactttcttcttgtctagctattaacatgatttgtcaaatgcatgtttttttcagccaaagccttgtttccatttttgttgatgtgtactcttgctcttttagctagagtgtatgtgaaaataaagaaatacatcattgtattcacaaccatgtgtcttcatttataactttttgtttaaaaaatttttagttcaagtttagttcattgatattatcctctgaatgcagttaaggctgggcagaaattctactcatgtgacatctgccacaggtctattttgaagcttttcttctaatggcaatgtttgtccttaccaggatttaatctatagaattgtctctcaactctgcttttctccagttccagataacgtccttaagaccatctgtgcaggggttcacaaaactcaaatttgtgtcattctattttatttattttattttttatttccttccctcataccttgcccattccctctgaatattaggtgtgatgtcaacagcatgttagaaggatcaatgggaaggcaatgattgaaaacatttcaatgaaccttaatagtgttcctttgaggagcacccaggagaatatctggtcatagatctttttttaaatgcagttttataaaaccctaacagcggtgatatcattagactgtatgaatcagttttattacctagtgtacaagtgtcagtcatgtatcattatatagtctgttgatctttccatttgcaaaaaattaatagttttcccccacaaatgtacaaagttgtatgcttccagtcttcttttaatgtttatagtcattccaaagtaacattctattttacactttcacatacattgttatgaatcattggtttttctcttttttccacttatcaccaatttatttcattcagccagatttggtgtctatagaaaaagaaattttaagaccattattaaaaataatatatggttagaaattagtagatggttctttaaatgtattccaatttttaatgttactttactcctgattcatttatatttttctgctttttatatgtttaaaaatctctcattctattgctgctttatttaaagaaagattactttcttccctacaagatctttattaattgtaaagggaaaatgaataactttacaatggagacacctggcagacaccatcttaaccaaagcttgaagttaacataaccagtaatagaactgatcaataycttgtgcctcctgatatggtgtactaagaaaaacacaacatcatgccatgatagtcttgccaaaagtgcataacctaaatctaatcataaggaaacattagacaaactcaaattgaaggacattctacaaagtgccctgtattaaggaattattcagagtaaaggagacttaaaagacatggcaacaatgcagtacatgatccgggattttctttttctgtaaagaacatgattaggattattagcgaaatttgaagatctctagtttttaaatcattgttgcttttctaatttcgatcattgtattgtggtcatgtacaagaatattcttgtttttaggaaagatagttgtatgtgtatctatacacgtctgtgtgtgtacatatagagggtgagcatgagagggagatagggaaaagaatgagaaagccaatgtggctacgcacatcattaatatttggggaatctgggtgaaaggtatatgggaatctgaaattatgtcaaaaaagtttcaaaagtttctcttcattgaattaatatgttgttatacattcagtaagcaaactattgtattggatttgggtacttagctagaaatacagaatatatagtccctgcctgtaagaaatttaaagctaagcaggcttttctaagactcataattaatgtaaacttgctcaaagctttattggacttatttaaagatgattcagactgataaacatggccactgattttatgggccaaagatagttcaaactatctttttttattcagtctgctgctttcagtctcatgcaataccttttctctttgcaaaagtcaaatttctctttaattttttatctagtgttgatttttacttcatatttgctatttgttctgtaatttttactatagctttaaaaactatctcgcctttcttaaccaagcagtaatctccctcttctttcacggttgttacacaggaggaatcttctctgtggctgtgtgtgtagggttaccctgtagtgccatactctgcatgccaggcatttgcacacatgaattccccaaatgcctccatgttacttactcaccattatttttttgagcaagaccatccttttgtgtggtttacatgcaaccacatgtaaccacatggttgcaagtgttatttaaagactaaagttttctttctcatatttggctctcttcactttgttcaagttattggcgttaaatttagtggcttgtctgttagagtctttgatattctagtgttatcagtgactgctctaataaaaagggcattaatggaaatagtttttcatgatgtaagttgtttgtgtaagacccaggagcagaaattaaaactttccatttgcactaaaggttaacctttcagggctttttaaatcttcaaatatatttacatttatattttcttcatttgtatgttccctttttccccattttagggaggaaagacatagattggttttctttacataatttcctccctttgaatttaccatttctaattacaacaatcctcaactcgaaagacccaggaaagaccaaagcctgcagccacagtgcaggaatcttaccaaaaaaactgttcatttttctccattttaagtgtgtgtgtgtgtgtgtgtgtgtgtacctacacatggggagggttattgcaggggttggggagcagtgcatttaaattttgtttcttccctggatctttcacaaacaattatcggtaaggttcctccttccccttggaagcacagaaaagacactgcctatttgaaattatattatttggggttgtcttgggcttctcttacatggaggtgccacctagaaaaaaaattgttttttgttaagaaagaaattagattctaaatgtgtcttatgtaaataatggtttgtttcttggtaaataacatgactactcccttatatcagctttaagtataattacacatttgtattaacttagaaatgactggtgctgttacaagtactggctgtcaggaaatgagcagtatccctcaccatttagcaggaaaaaaatcctgtttggaggtagagaaggaagaaatcagggcagcagattcacaaatgcttcatattgatgcatcatattgggggaagtatttaggcaaagtagttcctttagttatatcttttatatatggcttctagaattactacctggatattcaccttcattttgtagaacggtgtaagtggtttccattccagcatgaatgtggtcggtcacatggcagtggagtaaccaaattccaggtgttcttggaaacatttctagggtttggtatgttccagggaaaatgtcaaagacatcagaactataaactcccctgtgcttaattagaaaaatgacaaataatgtataatattgtatatgagagttcactcatgtcatttgttaatgttcagctcagggatattgaaaaaatggataaatctgtttttaaaaaatcgagctcgtttctgtgtttaatacaaatggtaaaatgtggtttttgtattcctaataagtctttggtatccacatcaagtgggtgtgaaagaaagatgtgatgagaatgaattcatcaatcaggactacctacaaacctcctgtaccttgattctggtttgcctgtttgtcatagcacttaagctacacaaaaggaactcagctgtggccccatttcagccctagcctcacttttgcctgaatctgtcctagcttgtctgaagctttaagtcaaggtaaataataaaggaagcagaaaaggaggctgatgaaaacgacaaaaaccagaggcacttcagggagtctcggctggaaacagtagttgggtgacaatagtctatttctgcaaggatagaattgaaagcccactaagaatacaatatatctatgtaaaacaaaatgcaggtaacaaaacaggctttctgcagtatgctttttgataacttctgccttttctaaattagcccaaagcataaggaaaaagcatttccaggagggccactggcttctgctgaaatcagtactgagaaagaatagaagtaagattgagatgtacagaccagttgcttgtcacctaactgatcttgctcaccatgggccatttaagatacagaacttagaacaggcagggcaagggttataataaagtcttgttgtggtctctactctcatccatcattatgtgaacattcctaccctctttgttagcaattccgctcagttgccttaatcaggaatctgagcagaactccatgaaaattcagttaaaaatgcaaatcctaggaagagctcaatgtgtaacaaaggctagtgtgtcaattgaaattgctgtgccttatataggcatccctcagtatctatggaggattggtttcaggaatgcccccataccaaaatccatggatgctcaagtcccttatataaaatggcatatttccatttaacttatgcacatccttccatatactttaaatcatctctagattattataatacctaatacagtgcctacatatcatttcatttgcatggattcaacatagtactcagtgcagcagatccaagttttgctttttggaacttagtggaattattttttcctgaatattttcaatccatgattgaatcctgggtggggaatccacggatatgaagcaccggctgtactctttgcagctttttttcataagtctctctgagaaaatattttcttcacttgtattaaaacattttcaaacagagcaagagtaattgccatggatagctcttaccttgtattggaagctatggccgtgaaartgtacagtgtgtaagtctatttcattgcccattcccatcagataccagttgacttcatctcccacgtgcattgtgaggccttgtaggtttccaaacattcttccattaatagctagggaaagcatatggttttatgttacttttcaggatattttaaaccaatagctatttcaaagaaaatatgattattaggttaatgtaaagaatctttttgatgtaataggacttattttactacaaatgagagaaatggatactttaaagtcaataatatcacattgcttttctaggcactttgcaccaaaagccttaatcttagttttggattatttcaaaggaaatgagattttggaattggaaaataaattagcaaatgattttgaacatagtcccctttttgttttgaacaggattctacctgacatacaaagtgaggcagaagtggtttattttaagacaaaacaaatgaatggtctccaaaataattttatttgaaagagaaaatgataaaaaagtagaaaaattgttttagaataatgtgacataccatgcattttattgctttctatgaattcctcatcatctttgtttactttctcggggtgatcagagtatgttttgatgttgtcatctaagtaccaagattcattctcatcaaaaactagaaacagaagggcaaattccagyttccttctgggattgaatactttcaagtaaggtcttcgacaaacaatcagggggccaattaatccactgtagaggtcctggaaacaagraaaatcttcagtaacccttgtgaattaggtcaggatttcagagaactgagactttgcacccagggcctcaggaattttggagagaccaattgaagtaacagactttgcccaatgtggtactgccaatttagtaacttttcacttgaagtagttaaattggaacaatggtgagtagtaggtaggtcatgtgggtgatgctgacataacagaaatgtctgcagaggcaaaaattagctcagctaatgagcagtgattttaaaagaatcccaaatgaacagtgttggtttgttccataaactcatgaactcttgagtgtgagccaagcgctatggcagtccctaaaaatccatagatgaatgaaatgtgtaataataaataggaccacaaataccagatttactcatttgtttgagccagaacactgaattatcaaggagctacttcccccggctcactcaggcacttcacccacctatctataaccgactccatttcttttctccctccttacagtagaggtccttgaaatttgcctcacgtattacaacggcctcccaacctccagtctcttccccctccaagccttccttcattccaccagaatgaaggatctgaaatgcaaatatactgccattcttggtcaatttttcagtggctacctgtgacccacaagacaaaaatctaaacttcccaaatatcttgaaaggcctttgagctgtatcatattaggaaatgttagatttttgtcttgtgtgtcataggtagcagcat

SEQ ID NO: 93951 - DNA, 13035 bp, Homo sapiens
aaaataatttgtcagcactggagctccttagggaacttctgctttaacagataaccgaacattactctagattgagaaacactgcctcatgcttttaatattccattaatcatgagctgtagtgagtcttttatcctagctagactaataaacatttagacagtgctcttccctaggctgactaatctattttataaagtagacatcaatttcaattgtctcttcttcctctgttggagtgttttaggccaacgtgttggtgacctttgctagacctggggtggcagggagttgtgccttccctatccctgctgtcttatcttcggctgttgctatggacaagcacgcaccaggccccttgggagtgttataaatggttagaagcagtgttttcttttctgttccattttctggttcaaaatgtttgcactatgctacaccagaagatttcctctctatcagaggctttgtccttcagtcctactctatgaaaaaaagtctttgtcaggtctggattttgtaatttcacaacctaaaatgtgaccccaaagcatcaccctctgaagagcctatctggagttaattttataaacttgtggtctctctctgggaagagagtaggtgcctaagggaaaccctcctgtgtggaaatagaaacgtgatgattttgcctggagaacagagaaaaacactccaaaagcaagacaacctagggtcagttgtgtggtaggaagaagactgaggcagagtcaagtgacttgggtgtgactacctgaatcacctagtgaaggtgttactctagacaccagtgaaactgaggtgtgcatgtcatacctggggacccaaacatgcaatctgtggtgttgcgacagaggtatgaatgaggggctgtgaacaagggtggactttctcagaagagagtcctatgagatgcccagtcgactttttgggatcagcattagaaacaaatgcaaaagtagttctatctctcccaaaataatgtacacatgtaacattattatgacattatgaggaaacccgatagacatctttctcctgaatctatattgtgtttatcaagcttcctaatttgcaatttgtctttgcatttctaaatattcatgaagaaatggactcactcgaattgcacattgaaagctgtttggtattctgtgcttcctttcgggggacagaggtaacagggaagacaatgtgctctgttcctgtaggtggtcctctactctatgagaacatcacattcgtctacaactcggagcagctraacgggactcagcgggttctcctggataacgtcctgtcggaagaacagtgccgggagctccacagcgtggccagwgtgaggwtccggagaaggaggggagctcactgcgctggcctgccaagaagctggaactgctttggtcctggtctcatctggagccagacaacaagccctgaaatattgctttcttgaggagaaagacataaattatttttgaggaacttttatagcctttgggttgggattattttagttttcccgggtgggatctggaatagctactggcatatttcctagcccaacagccatctagcaaggtccctgcctatcatataaagttgctggagaaatccttttattttaattaattattaggcaatatatcaataatttacattctttttatttccataaaaagtgacagtatttgataataaaaatgtagaatgaagattaaataaagatatctcttttaattaaaagaatagttataccagcatcctggaataaaatggggatggttcttagcattgactagagttctcagctttctggcagccaaagcagaaaaagacctgatgaattcatagttatcattgatgacgtatcttcttgtatttgcttccagggaatcatgcttgttggtgatggatacagaggaaaaacttcaccccatacacccartgaaaagtttgaaggtgcaactgtcctgaaagcactcaaagtaaagtcttaacttcttttgggtttgagttccttagtgtcagcctaaggcttctgtaaatggcagatataagaaagaaaaaagtggccaggcacagtggctcacgcctgtaatcccagcactttgggaggctgaggcaggcagatcacgaggtcaggagatcgagaccaccctggctaacatggtgaaaccccgtctctactaaaaatacaaaaaaattagccaggcatggtagtgggtgcctgtagtcccagctactcgggaggctgaggcaggagaatggcgtgaacctgggaggcagaggttgcggtgagccgagatcgcgccactgcactccagcctggcctgggcgagagcgagactccgtcttaaaaaaaaaaaaaaaaaaaaaaaaaaaaaaaaaagaaagaaagaaagaaaaaagttttgaatatatacctatcaggacagctgaaagaagcaagagtgaaatgaaaccttcattgtagttaatcattcctccgttcagccatcaacttatcaaactttacatttcctgacaaaaactacatacaatccctctttgtaaaatcatgatctaatagtgaaaacatattcaaacaagtaattattctctactgcaggaagggttgttagagaggatggtagaacatattataatagaagagaagaggaaccaagtagcttttagctttccatctgttattgggaagagtttattccaatggcacaatgtcctaaccgaaatccacaaatatgtagtagccttccccattagtcaatacagacatgacaatcctatattggctcaatgcaagctagtgcctgtttttcttacgtcctccaatgaacccatttgtttctcatgttttgtkttkttttttcagtctggttatgaaggtcgagtcccactgaagagcgctcgtctgttttatgacatcagcgaaaaggctcgaaggattgtagaatcttaytttatgctgaactcaactctgtatttttcctatacacacatggtctgccgaacagccctgtctggtgagattgcagtctgaaatggttcccttttacccacaatacattgggaaatgaaacaaggcaaaacaaagctcaacagcatggtagattaatattttagacgaattctagatttccaaaacaaaagtagcttatgaactcttattctgcttctttctttttcttccttttgttcttctgaagttccagaaaaccctcgttctgaacattttcccttccaaatcaattttccccaattgctgaagtcttgggaaaaaaaaatgcttttctgctgtaggtttcccattttgaggaatcaggaacatggaaatcatagtcaccatgatgtctaccagcattaagtggaagcatagaagatgaagggatgattgaaagaaatactcttaaaaagaccgggaccttctcggtccctgctcatcattatttctcctctatgtcttatgcccctctgaatggggcggggggaataatgatgtcataggagtagacttttacacttgggaagttttagctgaattaaatcttgtttttttaaaaaattttcatttccttcccattgttttgctgccctatgtgaagtacaacccatgaaacgcatggaatttgttcatgtatgtttatatcagaaataacttttatagctgaagagacaggtgtgacatgctcaaggtttcacatccagttcatatcagaaccagaccagaatctcaactacttgtccactgttcttttatctgttctttcctgttgtctgcctccgcccatttgcaaagatcatcaggactgggagaagagagattgtcagttactttggtggaagttgctgcacttcatttctcgttcttccctattcccttttctggcaggtcagcaggatagaagaaatgacctcagtcatcccatccatgctgacaactgtttgttggatccagaggccaacgaatgctggaaggagcctcctgcttacacayttmgagactataggtatagctagaacctgcttcaaaacaaagcttttacctaacagttttcaagcagtgaaaactggaaaggtgctctgttttgcttgacgtygtgttcatatctccaaggcagaaattctcaaataatcttctgaagtagctgccataaccaataagtggcattatcatctcacttttatcttaaaaattgtgcacagtttgcatcccatttcacaaaatgtccattttgttttaatatgaaaagtaaattttatgttcttttaaaaaaattcctgttctccctggaacatattccttgtggtatatgtatttcagtcagaatacaagggcatggagtcttggcctacataaggactttatcacatcaattatctttattcatacccaagaagaactatgtctgcattttataaataagacactagaaactcaggagaaaagaatgtcctaacctattgagagagatttcagtgtgtaaggaatcaggagttatagtcaccatgtgttcatccttactacactgtactcgattccaaaacatttattaagcacccgctatctgcaaggcgtggctaggccacaaggaactcttcagcaagttaaagagaaaaacaacaacaagaacaaagcaaacaaacaaacaaaaatcctttagagttatataagggaaaaagagagttgtaattagggtgggcacgttcaaagggctagattaaattaaaactagttaggttttctgtggaggaagtgaaatgtgagacaagctttgacatatgattacaattttagtaaaggtggaataagtaaactcttcagaggtataactcaaactctatctgatcttctctttaagagtttggaggaccaattatatcaatgtctagttcaaaggaaacttactaatggaggctggacagtacatcaccagtcttcagtattctatgaccatgctctcataagcatataataatacaaatagttttctcttcattcttatagtgctctcctatatatgaatgatgactttgaaggaggagaattcatattcacagagatggatgctaagactgtgactgtaagtaaacctattcttgaatacttatttagtatkttttagctcagtattgccatttttctaagtacttacagatggttagatttcaaatacttctgagctcaagatttcaagaggttaagagagtttcagtaaatgtatagatcataaactgttagaagtatccataaaaatctagtacgttgtaaagatgagtaaattaaagaattgagatattaatcattttatcatgatcatatagctagttagtgttagacttggaaccaaaacctaggtcttctaattctttgtcaagtaatctgatggaaacgtaagaacgtcagttcctaagtcacccaagtctagaataagtcaaatgattctacaaggtgtctttcaagtaacctggtgttctacgtacttggactgagcattggccttcaaatatatagttaccaaaattatcatatatgtgtgtatgtatgtgtatgtgtatatatacctataggtatgtgtgtatatatattatatatataaaaaatatatatataatatatatacacacatataaatatgcccactgcagcttcctttcccatgcagacatggcctcatatatatatatatatatatatatatatatatatatatatatatatktgcatatatatatgcatagagagatatatgattgtgactgtatgtaataaactcatacctgaaaattgatacacacacacacacacacacacaaatatgtaaacaaagagtaaatcaaaagttcaattcaacgaccatcttcctaagtaaacccgtgcctttggaaagaagcctacttaaagaccatatagttagcatcctttggtcttcaagccaaagagcatacacaatggtagaaaaatatattttcgactgctgccgctctttggcccacttcattcccttagtcccgagtgctcgcccactgcagcttcctttcctgtgcggacatggcctcaagcaccaccaccactgccatgaagattggaataattggtggaacaggcctggatgatccagaaattttagaaggaagaactgaaaaatatgtggatactccatttggcaagccatttgatgtcttaattttggggaagataaaaaatgttgattgtgtcctccttgcaaggcatgggaggcagcacaccatcctggcttccaaggtcaactaccaggcgaccatctgggctttgaaggaagagggctgtacacatgtcatagggaccacagcttgtggctccttgagggaggagattcaacctggcgatattgtcattattgatcagttcattgacaggaccagtatgagacctcagtccctctatgatggaagtcattgttgtgctagaggagtgtgycatattccaatgggggccaagcccccaaacgagagacgttcttatagagactgctaagaagctaggactctggtgacattcaaaggggacaatggtcacaactgagggacctcgttttatctcttgagcagaaagcttcatgttctgcacctggggggtggatgttatcaacatgaccacagttccagaggtggttctcactaaagaggctggaatttgttatgcgagtattgccatggtgacagattatgactgctggaaggagcacgaggaagcagttttggtggaccgggacttacagaccccgaaagaaaatgctagtaaagccaaaagtttactgctcactgccatacctcagataggatccatggaatggtcaaaaaccctccatggcctgaagaatatagcccagttttctgttttaaaatttttgcaatctatccttttgacaaagggctaatatctagaatctacagagaactttaacaaatttacaagaaaaacaaacaaacaaccccatcaaaaagtgggagaaggatatgaacagacacttctcaaaagaagacatttatgaggccaacaaacatatgaaaaaaagctcatcatcactggtcattagagacatgcaaatcaaaaccacaatgagataccatctcacgccagttagaatggcgatcattaaaaagtcaggaaacaacagatgctggagaggatgtggagaaataggaatgcttttatactgttggtgggagtgtaaattagttcaaccattgtggaagacagtgtggcaattcctcaaggatctagaaccagaaataccatttgacccagcaatcccattactaggtatatacccaaaggattataaatcattctactataaagacatatgcacatgtatgtttattgcggcactgttcacaatagcaaagacttggtaccaacccaaatgctcatcaatgatagactggataaagaaaatgtagcacatatataccatggaagactatgcagccataaaaaaggatgagttcatgtccttttcagggacatggatgaagctggaaaccatcattctcaacaaacaaacacaggaacagaaaaccaaacaccacatgttctcactcataagtgggagctgaacaatgagaacacatggacacggagggcaacatcacacaccagggcctgtcagggggataacattaggagaaatacttaatgtagataatggtttgatggggtgcagcaaaccaccatggcacatgtacacctatgtaacaaacctgcacattctgcacatgtacactagaacttaaaagtataataataataaaaaaatttccaattgagaaagtaagcagattatagatgaccaggtatctctcaccaccatacaaaatctaagtagttgggacatgtatgtgataaacttcaaagttttggcattatagaagctatttctaaacttttcttgaattttatgcttgtccctcatagcttacatgcttttctcattagtgaaacatatctgtcatttatgacacacatatgttattcatcacacagtactgtgatataagcaggtaatatcaaaaagtatgtattactgggttaaaaggtgattcctatgaggattctcgttaaaattgtctagaaacattgtaataactaagaaaaaatatttcatgtgacttcatacaataatatatgttaaaaagtcatgatgcctcactttttgggtaaaaagcttaaatgttaatatgggagtactttaatactccgtaatctgataaattaaatcaagattgacgatctgtattggagtttaaagtccagaaggttttttgcacttctgggaaagcttgagtgtaggaagcattttatttctgatctctgctaacactgaaactgaggtacaaaaatactggcatttcgcagtttcaaagaaagtcagacaggtggttgaaaagatttctttgcttctcctccatctagtggccgtatttggaaatgcttgatgcttaaagcaagggatgcctgtttcattaatttttgaatgtcaagttaactggaattctactttttaaagatgtgaaagcagataatattctcctttcagagtgctacaattttaattaaaatctataactatttttaaaaaccaagaatctaacctcccctaaaaaaactaaaactgatttaaacaaatttttaatccaaaagctcctgtttgagaacatttatttcctcaaatacttcatattaatgcatacagtggcattttagggaataacgtagataactaaaattcttacgtaaggcagttcttatctttccccacaggaagtttattctagtaccagcaacaacaacaacagcaacagaaatgggtatttttctgttttagtttccctttgactgtggagggacaaatggagcagagaaatggcataacttgaggccacataaggaagtaacgtcttctgagtcctttactttggaaaaatctggaagttgtgtaattatctgaaaggtggctgaaattttacttttattaaagacaattacagcacaaacgcttttctaaatcaatcatcagttagacggaaagcaaaaggattattttaaattatgcttagtatacttggaagatatgtggattcttttcaatagcggcatttgtttgtgagacttgggaattcaaggatgttggtttctctgtgcaggttcaaagaagataaaatttaatgagttccatttgtttcatgaaaaattaaattcagtataaacggggctgtgttacaaaagtatgtttataatcatttatccaaacttcataacatatttttgctgtagaaacaatgtcacacatggaagcaggttcactaaagcttgtttattcctccaaatacctgacatgtaacagatgatgttcgctgtgtgatgagatgggtcttagagatccttgtgaatccacggctataatcagttccaaccgcctcatacagttcacagcttcttttcctaaactttcccaaagttattcatgtttaaaattactttcaattccagaagaaagaaaatactaatttgtccccacatcctttctttagtcttataagatgttaccaagacttggtaatcacatagaaacattggcaaatgcgtgtttgagtgagtcctgaccagcaccagggagtgggcagcccagaaaacctgaaattccaacatcccaaggccatttactcagaaggcttttctttctttctttctttctttctttctttctttctttctttctttctttctttctttctttctttctttctttctttctttcttttttctttctttctttctttcttcctttctttccttctttctctttctttctttctttcttttctttctttctctctctctttttctttctttctctccctctcttctttcttttctttctttctttttttttttttctgtcacccagactggagtgcagtagcacgatctcagctcactgcaacttccgtctcccaggttcaagcgattctcctgcctcagcctcctgagtagctgggatcacaggcacccaccaacacatctggctaatttttgtatttttagtagagacggggtttcaccatgttggccaggctggtctcaaactcctgacctcaggtgatccacctgccttggcctcctaaagtgctgggattataggcgtgagccaccacgcccggcctcagaagtcttttctatcctacttcacaggttttacctttcacttattttgctgcttctatgtggaaatgtacaaattccttctccagaaaaacagaatcacattgatactgaggacacgactaactcgtgaactctctagatttacatcagaacagttgccttggtaaagctgtttaggaaaagcaattccagcaaagacaaatcactcttcagttattgtgagtagaagagtaaaaagaaactgactgctttttttctgctcttccctttaacactcacacacaagtcacatatacacacacatgcagactcacacagacataaacacacacacatgcccacataaacacatatgcacccacctgtctctctggctttccgactcctccacctacctcttaccttccatatgtagtcacgtagtccgggagtacctatgttatgtagcaaccaaggactttaggaaatttttcaaatattcttcctgaagctagcagtgaaaaaccagccagctcattttatgcagaaggaaaccaaagatttacgggcatatgtcaactcaagtcaattcagaaaatggctagtgagaaccagtccatgttctcacctagtaaaatggctagtgccacttttttttggttttactttacttttctgaactatacagaggaatgaataaagtttctgtatttcccaagaaagacaaaatggattctactcacatgagacacttctttaaacacagaagcaaggcctctaatattcagttgcttaagctcattcaatttgaagaggcagcttgtttgatcttctaccctggctcagtgagcccagcagtatttctttttctctcactacactcttctacctaaacgctgtggacagctccacctgagcagtgcataagctgcgaaggactgtgtcagtcttaaaacacttaagggtgatggcgaataggccactccaaggggtgtcgtgttctcaccactagagatgttcaaacaatgcctaaacgaccactgggaaacaatagtgtaaaggaaatgaaatatcatacagaattatgacttttaaaaatgtttgtattgtgaaaagcacataaaccatgaatgtacaatttaaaaattagaaagcgtatacgctcatgtaaccactacctagatcaataacaacttttccagcactgcagatgtcctgtttgtttgtttgttaattacacaagtatggaatggacacctaccttgtatccggatgctttgctagtgcaaaagctacagaaatgaattatgagaggaaaactttgccttctttgaatttgcaggctatcatatatatagcatgtattgaatgattactatgtatgtggactttgctacacgttttacttgaacatctttttattttctgaggtatatattattttgaccttacctttgttttacgggtgagaaaattgagataatttacatcatcttcaatcccaggattcctttattcttcgcctcaggccttaactcaaataatctcatagccagagaagcaggagttgtggaaatgtttatgatacaacaattgaaagtctaatttttgctttctttctcaggcctctataaaaccaaaatgtgggcgcatgatcagcttctcatctggaggagagaaccctcatggggtgaaggcagtcaccaagggaaagaggtgtgctgtggctctgtggttcaccttggacccactttatagagaattggtgagtttctcacccgcccagaaagccaattaggcttgcttcatgaactgctttatctgagaagtcctttaaattgcttcgtctgaggaaaagaagagggtaaaggcagttcttaatcagatatgttctagtaagtgaagatgtttgtagaaatagctgtgtcaatgatatttgatagtcactaatctstcttgagcttattaacaaattgtaaggctgggcgtggtggctcactcctataaccccagaactttgggaggccaaggtgggcagatcacttgaggtcgggagttcgagaccagcctgatcaacatgctgaaaccccatctctactaaaaatacaaaattagctggatgtggtggcatgcgcctgtagttccagttactcgggaagctgaggcaggagaatcgcttgaacctgggaggcgtaaattgcagtaagccgagatcgcaccactgcacttcagcctgggcaacagggcaagactctgtctcaaaacaaaaacaaaaacaaaacaaccctgtggcatcagggaggaatcactttttattggtcacccagaagacggatttgttttctcgcaaatcataagaaatagtattgaatcatttatgaaacgtatttgaaagagggcaaggaaacctaaaagattattattacttattaatgttattacattaagtatttcaatattattatatgcaaactagctgaggacacttagctaggaggagaccatgatctcatcgttttggaagcccgtgggcagatgtcatagtctccacctgtggagctgcagaggtatgaattaagaccaatgggtagaagccctggagggaaaatttgggctccacacaaggaataactttcaaatagtcaccacagtttggcagaattgtctgctttggaagcactgattggatggctccaatcaaagcccaggcaactgcttagcatggaacgctgaaatggaatctaaaacatcgtagcagaggcttaactggatgacctccaaatcttctccagccctaagtattgatgaagctatgaaattctattctt

SEQ ID NO: 93952 - DNA, 31814 bp, Homo sapiens
tctggacttggcattggcaatctctgccgcttggcctcctgctctagggttagaagcatgtttctttctttcagtaagacatacctatacaaaagaacacaaaccttgtgatgctattctgtggttatgttaataaagttgtgatttctgacatcaaaattaattatctgtacttgaaagtcacttagaggcgaggtgctgtggctcacacctgtaatcccagcactttgggaggctgaggtaggaggatcgcttgaccttgggagttcaataccagcctgggcaacacagctagaaaaaataaacatcactacaaaaaataaaaaatataattagccgggcatggcagcacacacctgtagccccggctgtttgggagactaaggcaggaggattgcttgagcctaggaatttgaggctatagtgggctaagatcacactactatactccagcctggggataaagtgagatcttgcttcaaaaaaaaaaaaaagacatattagaaatctcaatatatagaatatgattacaaagaataatccattatacataaactatctttgcttatccatgtgttcaataaaccttccatttgccacatgtattaagtgctaagagagctacaaagaggcataaaacatagtccttacattctgagtggagagtagagaaggcagatggaagataaataacatttactgagtacctattatatgccagacaatgtgttaaacattttatatacacttatttcatctagttttcacaaccaccttctgaggttggtattatttccacttacttaacgaagaagctaaggctgagagaagtaaggtattctgggtcatacaggtaattcaagattcaaatccctgatctctgtgtataaaatccattctattttaactccaccacgctgcttctgaaactgtaatgtgatgtgggataataagtgggacaggcaataagtaccagaagaattaagtgggggagatgagaaacatctcttctagctaagatgaccagggaaagagtcatagagatggaatttatgatagaagggagagcagagcaaacataatcaaaggtactgaagcagcagagctaaagtgaaggcagattttctgaatacatctatttgggaatacgagttggggccaagtgcagtggctcacacctgtaatcccagcactttcagaggccgaggcaggtggatcacttgaggtcaggagttcgagaccagcctggccaacatggtgaaaccccgtctctactaaaatacaaaaattagctgggcatggtggtgcgtgcctgtaatcccagctactcaggaggctgaggcaggagaacctggaatggaaggcggaggttgcagtgggctgagatcgtgccattgcactccggcctgggcgacaaagcgagactttgtctcaaaaaaaaaaaaacaaaaaagagaaatggcataactttagttggttgcagccatgatgaatgttgaaatagccttaactatcctttcactgataacccacagtaactaatagtgctttaatacaacttatttttctataatgaataaacatagtatcagtggttttcataaacacttcacaattctttaatttgtcatgaaagataaacaatgctttacatcaacaaacataaatgttggctgggcacggtggctcatgcctataatcccagcactttgcgaggccaaggcaggcggatcacttgaggtcaggaattcaagactagcctggccaatgtggtgaaaccccatctctactaaaaatacaaaaatttagctgggcatggcagcatgagcctataatcccagctacttgagaggctgaggcatgagaattgcttgaacctgggaggtggaggttgcagtgagccaagatcacgccactgaattgcagcctgggtgacagagtgagactgtgtctcaaaaagataaaataaaaaaaagcaaatgtctactagagtccctaggcagataacaattatgaaggaagtagacatagtgaaagaaccacagggtggccgagaagtggtgtgtccctgctccatctagaaggggcagttgctccacacaccagccaagttgttgccatgtaggaatgcagggccggtgttgccaaatcacaggtctcattattcaagagccgacaaaaataatattttctgtgtgaaacttcccaatttaaaaaacaattacagtccaaacaaaacatatctttgggctacatatagtacattaaaaatgcaaccctgtcttaaatcctctcaaccctaattcatcagagcctgccagaaaaatctacctaaattctcaattaaatgcatcctccaacacacctttccaaagcaaatacactaaagattacagatcatgaaaatgtaataaaaaggagagaattttaaatataaccaatggctgggcacagtggctcatgcctgtaatcccaggatgttgggaggctgaggtaggaggatcacttgagccccagtgagagcagcctgggtaacatagggagactccctctccataaaacgcaaaaaaattagctgggtgtggtggtgcatacctgtggtcccagatactcaggaggctgaggtgggggatcacttgagcccaggaggtcaaggctgcagtaagccgttactgtaccactgcactccagcctgggcaacagagcgagaccttgtctcaaagaaaaaaacaaaagccaccaactattctctgtttcattttattaattaactgaaattgctagtataaacatgttagtaggaccaatgtaaattacagtaaaatttctgaattcccaactacttgagaattgtgacatttgtcataatctaacctctgtcatataaaatctttcatgatcttaaacatcagatttatcatccatagtactacaaaagaaatcgctttactcaatttcttatatcagatagattgttttcacctcattgttacactataacggcttcaaacgtctagatgttaatgtacttagtatacttaccaaagtttgtgtaaatcttcattacttttgttccttagttgctgacaggtccatgctgctcctattaaaataatacataacatgaaataacatttctagccatgtgccctttggcaaattatttaagctctctaaacctgtctaaacctgtttctttatctgtaaaatatataacagcttttttatagtatataacaatgtgtaattagagataaattaggtaacatacgaaaatactattaacatgactggcaatagcattcaaaaaatgttagcattagtacagaacgtattttcacaccctaatgacaaaatactttgtcattataaattaactggggcggtggttcacacctgtattcccaacgctttgggaggccaagacggcgggcatcacctgagtttgggagttcaagaccagcctaaccaagatggcgaaatcctgtctctacttaaaatacaaaattagccgggcgtggtggcacgtgcctgtaatcccagctactcaggaggctgaggcaggagaatcactggaatccgagaggcagaggctgcggtgagctgagattgtgccactgcaccccagtctgggcaacaagagcaaaactccatctctaaataaataaacaaactttaaattatcattaaaaaataaaatctaaaataagccctaaaccttactttagttaataatttcagcctattccttatctaaccatcttgccaatctgccaaggaacaattaactctactattatattgtccctttaattttctctagtagacagtctcaaagaaaactgaaaaaggaaacatctaaataattcctaaactggatatataatcctagaacgatggttgggcggggcgggggggggggttccataaatatatctaatgttgacaaatccaagtatctcaccagattttactttttcttgcccccagttttttgggtcatcaaaaaattcttctagtcctttccttgacaatgtggtatgaagtaatctatattggtgaaaggatgtcacatttggtgtactcttaggcaacaaactaagaaaaaacctgcaattgaacacacataaacaagtaaaagttttataatatctggattttataagcaataaacattatcataataaacataatcattttgtcatcgataacattttaaaaagctactcagggtttctgcacaagaattaatttttttttcttatttagagactgggtctcactatgttgtccaggctggtctcgaactcctgggctcaagtgatcctcccaccttggcctcccaaagtgctggaattacagggatgagccaccatgcttggccacaataaattttgaaaatgctttagaaagtattgttaatactgcattatagaagctgctaccttataatttcagaggtaacatagttacacaattatattttaaggtaacatttttgggtccttcttacattgctaatgggtgcaagcgcaggtaaaaagagcagtcaattttgcaacatgtgggctgggcacggtggctcacacctgttatcccagaaatttggaaggccgaggtgggaggatcactttgagcccaggagctcaagaccagcctgggcaagatggcaaaacctcatctttaacaaaaatacaaaaattagccaggcatagtagcacgtgccttatagtcccaactactcgggaggctgaggtgggaggacgctttgagcctgggaggcagaggtttcagtgagctgagatcacaccattgcactccagcctgggcgacagagtcagtccctgtctcaaaaaacaaaaacaaaaaaacctcacaattttgcaacatgtatcaggagcctcaaatacttcctcctttaattcagtaattctgcatctagaagtttcaactgaaaaaattattatagatgggaatttataaattaagatgtttattaaagcactatataggatgtcaagtttttaattatgtaaatacgcagctaagaatggtttaaaaattactgtgcatctggatgataaattattatgcagtaattcaaaaatcctgtttttaaaaaatagttaacgacctgagatgatttgaaactaaataatgaagtttatcacaagtgttgtatccctaccaaaaatatttagcctaaatcttataatgaggaaacaatcagacaaatccaaatgaataagattcttaaaaagctaatctcatcaaaatgtcaacaacattaagaaaaaaaaaaaaaagaaattgttccggatagagactaaagagtcatggcaaccaatgtaataaatggatacttcactggatccaggaccaagaaaaataaataaataaaagaagttactaagttaccagttactttcattgtaacacatcctgtaaatacaaatatctcttcttttttaatccatccaaacttgacacagacttgagtatcacaacaaaaacatcttcggtaaagtttttcgcacctcacccagcccaagaggatgcttctgtacttatagatgtatttacttcaacaaatgctggacatctacaaaccccatatactgtcttgtccacagcaggcagcaacaaaatgaggaaggaatagaaatgtcggaggtgagcgacttctccaaggtcactcactcctcaccaaagtgggctccggctctgccatccaggcggccgttccattcttgagttgttctcggcatctcggcatctcggcaaccaaacaagatccaaagttggagaggtgggcaaacctactttatacatcacttaccctgtgcaggcagggacctgaggagttattaacgatcgggaagatttcagggcggatgaaactctcctacaaagaagggccaaaccggccgcagccatgttttcgcataactggcaaaacgcgtttccgccaacgatagcgtcacttccggcgtctcaagccggcggtgaggagaatagmaaacttgccctcacttaagatggccacatcctgcctttgtcctcattggtaaattggctctctcagcttccgtgacccgcctcccttcttcytcctgcccgtagtagccatggcggccatgagtttgttgcggcgggtttcggttactgcggtggcagctctgtctggscggccccttggcactcgcctcggatttgggggcttcctcmctcgtggctttccgaaggctgctggtgggtgctggcctagggagaacgggcgtgaagcgggtgcggggcgagaaaagggrggacgcttccagggtgaccttggtgggatccggagggagccgggacaagttgtgggcttggggcttgacaggagagacggagcacgagctatatgaggggttttcctgaagtagccagatagatcgtgtttacattattagcatttctaaaacgttgttattcaccatcccaattaatgctaatttgmggatgaagctgagtctagaaaggtatagagctgagatctgtatctctagggcacaagcttattgttgcgttccacctgcccaaaggctaggttctagtcccacagatgcaaagtcatcttgccgagaagcccacctatgctaaggaatatgaagacaggtaatatgtagacaggtaaagaggctcagggccaacttattctttaggcacagtaagtaccgtgccgcccaataatgagatgcagatgaactggggaggaagagaggtttttgttttgttttgttttgtttgtttgttttttgagacagagtctcactctgttgcccaggctggagtgcagtggcgcgatcttggctcactgcaacctccgcctcctgggttcaagcgattctcctgcctgaacccatgatagttttaggggtctacgaaagtcttttaatttaaatttcttttttaaaaaaaccataatgtttatgaatatgataacgaatccagcctgtattatgttcgttttataccaatgcagtcataaaatattatttttaataacttagacgaaggggcccttgaaggcaaaagtgcctaggtctcaggaaagtcataatacagtctttttttttttttcttttgagacagtctcactctgtcacccaggctggagtgcagtggcaccatcttggctcactgcaatctccaccccccgggttcaagcgattctcccgcctcagcctccccagtagctgaggctacaggtgcacaccaccacgcctggctaatttttgtatatttagtagagatggggtttcaccatgttggccaggctggtctcgaactcctcacctcaaatgatccgcccacctcagcctcccaaagtgctgggattataggcgtaagccactgcacctgaccaatacagtcttaatagggctatttggacctccttggagacagtgagttgcatcatggcggtgtgaataatcatagcaaagatcaaatgcttgatattcagtgtactttattatctcagagactctgcaaagaaattacaatgttattttcattttacagatgaggaaactgactcaattattaaataatgtgtcactaaataatagccaacatttactgagcacctgttacgtgtcaagcatccttttttatttttatttttttcaagacggagtcttgctctgttgcccaggctggagtgcaatggcgtgatcttgggtcactgcaacctctgcctcctgcgttcaggcgattctcctgcctcagcctcttgagtagctgggattacagttgcacgcctccatgcccggctaattttatgtgtttttagtagagatggggtttcatcatgttggctaggctggtctcgaactcctgacctcgtgatccacctgccttggcctcccagagtgctgagatcacaggcgtgagccaccccacctgacctcaagcatcattttaagggtttaaagtattaatttatttaatcctcttcattagatatatactgtaagctatttgccctgtgcaatagaagcaggtaaagaggaagtgaaacacttaaagtcagaaagttgtctccagcctcaaaatatcttgttctctttttacccctattctcccagtttaatttgaattatgccactccacaggatgaggcaatatacatagggatttgctggaaacatgatgcaaagaaccagtggtatttaacaaatttccagcaggaatttgaacttgttacaaaactacattccttgatgaaaatccctttataagccatttctgattacagatattctcatatagccaaatacaaatccttcaaatactcgctctggtagtattcaatcaaatccagctggagataaactgcagcaaaatttcacccccagtttctctttccacattattgccctttcttggggttctcaaaggatcattaccgtgttctgcgccctttccaatcagagcagggaaggttctaatagctatgtttactaaaggttactgtgttttcagctgtgtacctgctttcaaaggtattttgcatctgtcactgtgatatgaaagcttttaatctcttacatggttgtttatatctgtccctacaagaatgtaagctctaatgtagtagagagcctgtcttgttttgttttttctggagatagactgcctatcttcaaattctggctctagaattcagaagccatgtctgtgatcatcacatcttggaagctaaagtggaagacacctaattgctcataacctgcatttcctcctctttaaaaaagatgagaattttaacctgcctcaaaaggtagttgtgaagagtgagtggaaaaaatcaacagtgcctggcagcagtagcctttaaaaaaattgtggtaaagtacacataacatttactattttaaccatttttaagtgcaccgttcagtggtattaaatacattcctaatgctatgcaaccatcaccatcatccaactccagaacttttttcatatggtaaaactaaaactctgtatccgttaaacaataactctccattccccttccacgtagcccctggtaaccaccattctgctgtctttatgattttgactactctatttctcatgtaagtagaatcatataatatttgtctgtcacttagcataatatccccaaggcatatttatgtcgtagcatatgtcagaatttccttcctttttaaagctgaattgtccgttgtccattgtatgtatttaccccattttgcttatccatcatctgtcaattgggttgcatctaggttttgtttgtttgtttgtttgttttgtttttgagacagagtcttgctctgtcttccaggctagagtgcagtggcaccatcttgactcactgcaacccctggcttcccgtgttctcatatcaaactgaaggtcaggctgctatttcttgccatccaataatgagatgcagatgaactggggaggaagagagttttttttttgttttgttttgtttttttttgaaacagagtctcactctgttgcccaggctggagtgcagtggcgcgatcttggctcacacagccatctctgcctcctgggttcaggcgattctcctgcctcagcctcctgagtagctgggattacaggtgcacacctccatgcccggctaattttttgtatttttagtagagatgggttttcaccatgttggccaggctggtcttgaactcccggcctcaggtgatccgcccgccttggcctcccaaagtgctgggattatagacatgagccaccgcgccctgccagaagagagtttttattcctgtaactggttacagggagaagtcctggaaattatcgccagaccaacttaaaattacagttttccagagcttgtagaccttttaagctatatgtctacatgtaagtgtgcacttatctaaagacaaaagtgactaactttttaaaatctataattaaggtctgagtcctgaggaccttcctctggagccttagtaaatttacttaatttaaatggatccaggtgctggggtgattacccttatcttatctcctgctaaatcayggaggtttgggaagttccttcagacctccagtcaacttgtttgtggaggcctggggagtttcttcagacccacaaaaacttgtttaatcctaaatgggttctgttaagaattctttcgaactcctgtcctcaagtgatccacctgtcttggcctcttaaagtgttgggattacagctgtgagccactacaccgaagcacttgcagattttaattactgtaaagcttcacttaacatcattggctcttgaaactgcgaccgtcagaacctataataaagaaggaagtgatgttgtttaaggacctgctgtatgtggtttcacttaaagtcacagtttccaagaactcatcagtgacattgagtatgacttgtgttgtgaataatgtttctgtgaacatggatatacaaatacctcttctgagaccctgctttcaattcttatgggtatatctgcagaagtgtaattgctgggtcatgtgtgtcatgggtgttactggctgggactggcattgtgggtggtraaagaatttaccaagacagtcatagatacagaggacagatttattagagaaaatacgaagatagagttgcaagagaacaatgggcagcacagcagagaaggggctatctgcagagtcagggactggagggaagttttatagggtcatactgaaggggctatgagcagaraagatgtgcagataaggtcactctactggggctatgtgttgaacgaggtatttgggaacaggatgttgtgcctgtgggttgcctgtgattagccgtgtctcagcagaattgctttcctccacctggggccccttccttgttgcttatgtatcttactaggattccacaatatggtaattctgtttttaattttttgaggaaccctcatgctattttccatagcaacaataccattttacattcctttgtttaccaacagtgtacaaagattccacttcctccatattgtcactgacacttgttattttctggttttttgattgtagctattctgatgggtatgtgatgatatcattgtagttttgatttgcatttctctaattagttttgttgagcatctttttgtgtgcttcttgaccatttgtgtatatatcttctttagagaaatgtctgttcaaatcctttgcttattatttattatattattattttttaacttgagtatgaggtctccctaatgttgcccatgctgaacttgaacgcctggactcaagcaatcctgcttcagcctctcaagtagctgggactacaggtacatgccactctgccaggctatttgcctattttatttatttgtttatttatttttgacaggatcttgctctgtcacccaggctgaagtgcagtggcgcaatcatagctcactrtagcctcaacctcctagactcaggtgatcctctcgcctcagcctcctgagtagctgggatgacgggtgcacaccaccacacccggctaattttttaagttttttgtagagatgagatcttgctatgttgaccaggctagtttcaaactcctgggctcaagaaattccccacctcagcctcccaaagtgctgggattacaggaatgagccaccatgcccagcctatttttaaattggattgtttggtttgttgttgttgttgttgagttttctgtgtgttctgaaatcaatcccttatcagatatatgatttacatatattttctcccattctgtgggttgcctttttactctgctgatagcgtcctttcagacacaaaattttaaaattttcatgaagtccagtttgtctagtttttctttttttgcctgtgcctttgaagtcctggcattagccttctacaaattcctatagcctcatccttcctaaagatctagtgctgtcatgttcttcatcaccctctgtaaacctttctcagaaaattagcagataaagctattctgtttaattaaattatttattaaacatcaaagatggtgtaattccagaaatgagctaagttctcccctcagctgcaggtaaatttaatttataattgaagactgatatgcataaattatggtttttaaaaatgtgaagagtattaatatggatgtataaacagagtgctgtggagttaatccagacatggaatagatggggcattttaactgaagtatagggatagttttaataggtggaactggcagaaaagtaaaggttgagttttttttattggatatgtgactcttggggtaggtaggcgttgggagaaaaggcaaataaaggaaagttgggaccaaattgggggaggggagggactgactacaaagccaacgtatcttcatttgattttgtaggcaacagagtgttgtagcagaagagcaatatcaggagtgtgttataggaagatgcttctgaatattggatggcttataggggatgttgattacctaggtcagtaaagtaaagaaggcatggaatgaaatggagaatttaactcttagaatcaagaggccttggcaaatgatgaatgaaggatagatgcaaggaagatgattgagatttttatccaaggtaattgagatggtggtgccctttactgggaatgagggaaagaaaatgaccaattttcagttgttgtcttttttttttttttcttgagacggagtctcgctctgtcacccaggctggagtgtagtggcgcgatcttggttcaccacagtctccgcctcctggattcaagcgattctcttgcctcagcctcccgagtagctgggatcacaggcctggctaattttttgtatttttagtagagacagggtttcaccatgttggccaggctggtctcgaactcctgacctcaggtgatccgcccgcctcagcctcccaaagtgctgggattacaggtgtgagccactgtgcccggcccagttgttgtctttgacacacaaaaagttcccacattcccacattatcttattcaattcttataaaaatcgcaatcatcaaaggcttaataacttttctgaggctacrtgcatttttaaaaattagtcattgaagccttgggcctatgaaattaataaatacttaatggagaaatttcaggctttagagagcagtgaaagatgcttatttttggtgtcaggaggttcagggttccagaaatcctggtagtcacctcattgtaagcaatattcaccctaataattcaatttttttttgagggggaagggtctagctatgttgctcaggctgacctcaaactcctgggctcaagtgatcctcccgcctcagcctcccgagtagctgggagtacaagcatgcaccaccattcctggttacacactaatatttttagatttaagcagatggccctactacatcaacaatcctgaaggctcaaaacatttaaaaagagttaaaggcaagttggttgtggtggtgcgtgatgtaatcccagytactccgcaagctgaaggtgggaggatctctcgatcccaggagtttgagaccagcttgagtaacatagcaaaaaaccttgtctctggaaaaaaaaaaaaaaagttacatgctatgaaatatactttgaaacaatattaataagttatctaggacctttaatgacatgactaattgtttaataattgggtaatatgtgtaaagaaagagcaagcagttcacattactaagtgcattaaaccttttttttttttttttttttgagacagagtctcactctcgcccaggttggagtgcagtggcgcgatctaggctcactgcaagctccgcctcctgggtttacttacgccattctcctgcggcctcccgagtagctgggactacaggcgcctgccaccacacccggctatttttttgtatttttagtagagacggggtttcaccgtgttagccaggttggtctcaatctcctgatctcgtgagccgcccgcctcggcctcccaaagtgctgggattacaggcgtgagccgccgcgctcagccaaaaaccgcaattactttcagttgcaaaaactgcagttacttttgcaccaaactaatactaagctgaaaatagattgtccctctaaaagagtatgctcttgaatggacacatttctgcaggtgtagtcrggggataagcgacagggaagatcatcctgttttgaccctgtgcttctagtgtatcagattaagactgaattggcctttggcttttttgtgagcaactaaatttctgggagttccaggcggaacttccacttaccttattatgttgaatccttttagatttagccttttgtaatgtgtgtaaagactcttttgggaccccatggccactcttgtagcagtagctttgtgtttctaagactcgacaagtcaggaatgctgtatccacctcatctaagccattcataaaaaccttgatgctgcagggcttttgagagatctctttgccaggttactgcagtaattaatcagtaccttttgcttacagtcaatcaagtacccattacaaatttctctaacttcctctttctctcagcttataatgtcccctcttcccaacccccccatcttgtctaaataggaacttttcttctgggccactgtatcctatttctttcccttgttacccttacagatttgtaattacttgtgtagtgtgtatttctcccagcaagatctatatccctcttagaccgtatatagktctagcataggatctgcacatagtatgcaattaaatatgtattgaattaatgagtactttgtactgtcatccaacccgttttcttcatctagtccacaaaaaaaattatgtatgtttcagatgatttgctgaagtccatacttactttgtcaaattctcttaatcttgttatttaaaaagccttagtagtatgaattatatgtagtaaattcatgccagtttctaattctcttgtgaatcaacctcccaaactcactgcaagctgctgcagatgttaccaaaattaagaagatagttcctgctttcaagatatttatacttaaaagtggcagcagtaaacacaaatatacatgtcacaataacgtacagtaattcaacagtaggaaagatctcgtgtggttgggaaaaatgttggcatcttggaagataagatgttatctgggcctaacatagatttcaggagaggggacagcattccagacattaaacatgaacaaaagattcagatctttctgacatctattatgactgaaattcctttaatgggaaattaaagttttttattctacagtgactcacatgcaaaatatccttgagagtagttacacagtgaaaagataggaaccttcagtttctaagtaacagctagatcctttcctgttcccagtggaaagggcttggaatgcctctagtgatccttgcagaccttcaagaggaagaatataaaaagaggatccagaagtgaaattttgcctcagtttacttccagcaaggcttgattaaattctgtcagggggagacttgaagaggatattcttaatcagcaatggtttaccacgtgattttatcaagatattttagagtgtgtagtttgataacaagttctaattcctgctggtgatttgttgagtaaatacggctggtcctttccatctattttgcagcataataatacatataatacagataatgtgtcatgtgaaatggcataatggaataatttaaattaaatgtatttcttttgcagcattagcaaatatttgttgcagaggagacacagatgagcagctcattaagtacctaacctccctgcctgctattgaaacaaattaaaatgattatttagatactttaactttgaattaaaatgaggaaagttatgctttagaacagtagatccatctttgtttaaagataccctatctgacctggccttattactcaaataagacattttaaaatcttaactcatattaaacatctaagaatgtatattttctttttgtttcatgtcagatgggtaatgtgcctacctcataacaaggtttgagggaggcacatctcacacctgagtgtgaaaacccagtcatcctgcttatgagctacaaaaggatccttgtatttttttataatctgattttaactcagaatataacagtatacccatatgaaccttgtataaaacagggtaattcaatattcccagctcctgttcgacacagtggagaccatgggaaaagactatttgtcatcagaccttctagattctatgacaggcgttttttgaagttattggtaagtttaaattttttgttgaattaaagtctttgcatgtaacagggaaaaaatttttgcctctttagaaaacatctttcattttatgaaatattttattttgtaaatttatatttctttctgtagaagatactgagactgtaaagtctgatttgttattgaatttctctttaaattagtgaagctttccttcttcacaaaaggatttacactaaatggaggtaaaacttgaaccattcctttcttctgaagattatggcgtttcgaaatagaatctgtgttcctataactaaaatattctttaaattaccaaagaacttgttgaaagacttgcttaaataaaggagctacattattttgggatatgattttatatttatatgttgttcaggaacatttatttcagagagtaacagggatctatagtgcaatcttaatttagcaataatataattacattgcttatttagaatgctgactatatttctgtctcaaggctctatacgaacaaagtagaggcttagaaaatgggagattgtctggaccatctgccacggtagataaagctctgaatcatcatttgagtactgaccttaaaactttctcttgcccttccgttgtgtttaatgacctttttcatctccttggttgagcccttacttttcttgttatgaccagctcaaatcctatttagtggtagaaatcaccctgatgcttttagacttttgttcttaacatattattttctttcatggcattgctttaccaaaaagtaaaatcacagaaatcaataatttggtactgtatgcccaatttggcaagtttattttataagaaatatgaggaaatcatatcatgaggatgatttgtgtgtggggagagttacgaaatggtcatgagaaacacttttttttttatcttagagattctacattgcattgactgggattccagtagcaattttcataactctggtgaatgtattcattggtaagtcacttccatcccctgccagcaccaccagattggaaaaatttttaaacatatgtacattaatataaaaaagaaattatggatattgtaatgaaaagctctttaaataattaagcataagcatggcagtttatcttaaaataaccaaatctcaatctgaactaagaattttttaatccatcctagaacatataaaactataatcctcggccaggcacagtggctcacgcctgtaatcccagcactttgggaggccgaggcgggcagatcatgaggtcaggggttcgagaccagcctggctgacatagtgaaaccccgtctctactaaaaatacaaaaaactagctgggcgtggtggcaggcgcctgtaatcccagctactcgggaggctgaggcaggagaatggcttgaacccaggaggtggaggttgcagtgagctgagatggcgccatcgcactccagcccgggcaacagagtgagactctgtcccccccccaaaaaaaaactataatcctcttacaaagactgaaagtgtcaatgacagtaaacattagattttcgtgggaaattttgttcaaagtacttctaacaccttgaatcctaaaatgttttgtatcataggtatagggaagaccagaaggaataatatgtcttttattatatcttgttacagtatagaaaaacaaaatgagaaactcatggaatacctataaataatgccttacacagagagatgtctaaaaatgtctaacaaatgaattgattttcaaccagattaaagtgaattaaaaatactacatatcttcattggtacaaattttttaaagaatcctttaaaaccacaagaagttggtttcttactttaatggtgaataattaattttataaactcctcatgctaaagttaaacataaccattttttcttattaggtcaagctgaactagcagaaattccagaaggctatgtcccagaacactgggaatattataaggtttgtataggacattgacaattacatactgttacatgccttgtcaacgcactagttaatgtcttaattcagcaattatgatatagtcaggttttttgttttgttttttttgagacagcatctcgctctgttgcccaggctggagtgcagtggcgcgatttcagctcactgcaacttctgcctcccgcattcaagcgattctcatgcctcagtctcccacgtcgctgggatcacaggtgtgtgctgccactcctggctaatttttgtatttttagtagagacaggatttcaccatgttggccaggcttttctggaactcctggcctcaagtgatccacccacctcagcctcccaaagtcctgggattaaatgtgtgagccactgtgaccagccatgatagagttttatatttcattttttatatcaagcagatacatttttttgcatactttttataaacaacgaattttggtacttcatttttaaaaaaatcattttaagctttacaattttttaaagaatgattgcagtgtgttctcagcctaacagagtaacataatttatcctaagttcaatgccttaggagagacttcaccaatgttaatgctagctgtcatttattgagcacctactatgtaacaggtactgtgctgagtgttttacaaatatttattatttcatcccatgtaaaatgtactattattattccctctttgtagatgaagaaagtgaggctaaaagagttaagtgacctgtctagatggggtcactatttcaacccgggcaactttgactccagagcctgaactgttggtcattataccatactgccactgctaccaaaatccaaaattaattttgttacttgttttwacaagtgttattgtgagccttgaatggagtatatcccatcatgttttattatctgaatgaattatattttaaatacaaatcttaaaccattaaatcttaaggcagaccttacacttagtttgtttatgctaactggtgcaaagagctccatttttgaattaccaaaacctgggtttgtcttctgaatctgccacctaagatactcagcatagtgtaatggaaaagagtacacagctttggagtcagacagacctggtttgagtccaggtgctgccatttattagctacgtaactttgtgcaattcacttatctttaaaatgcggacaaaaatagtatccacctcatctgttaaaattattttatatataggtatattagttacatagtagatgttactggtttatctaactgaaatgatcattttaaagaatagtcaactagaaaagcaaagtattattcagaaatggactaatattaaacgaattttctcttgtagcatcccatatcaagatggattgcccgtaatttctatgatagtcctgaaaagatatatgaaagaacaatggccgtccttcagattgaagctgaaaaggctgaattacggtaggaaaaacgagggggtaggtgggaaagaaaatcttcctaaggtagcaaaccaccagaaaaaattaataaaactatgaatatttcagcactataggatactttatgtaaaaggataaagatacgtccagatgcagtggctcacacctgtaatcccagcactttgggaggctacagaaattagccgggcgtggtggtacgtgcctgtaatcccagctactcaagaggctgaggcagaagaatcacttcaacctaggaggcagaggttgcagtgagccaagaccatgccactgcactgcagcctgggtggcagtgtgagactccgtctccaaaggaaaaaaaaaatggataaagatagaattagcttgtttggagtgaaaactataaactggtgacaaggagactattaggagatatgtgtcagattaaagagttcttttttaaatttttgaatttttttttagagtggaagtcttgctctgttgccccagctgggaagcagatggatgggtatatccatccagtgaaatatataatgtggccattaaaaagaaagggatatatgctgttatggaaagctatgtggattttctttcttatacattatattttatatacatattaaaaagctagacacatatattttttcccctctcttatggtgctgagtgcctgttttttttttttttttttaattatactttaagttttagggtacatgtgcacaacatgcaggttagttatgtatacatgtgccgtgttggtgtgctgcacccattaactcattatttaacattaggtatatctcctaatgctatccctccccmctccacccaccccacaacaggccccagtgtgtgatgttccccttcctgtgtccatgtgttctcattgttcaattcccacctatgactgagaacatgcagtgtttggttttttgtccttgcgatagtttgctaagaatgatggtttccagcttcatccatgtccctacaaaggacatgaactcatcattttttatggctgcatagtattccatggtgtgtatgtgccacattttcttaatccagtctatcactgttggacatttggctygtccaagtctttgctattgtgaatagtgccacagtaaacatatgtgtgcatgtgtctttatagcagcatgatttataatcctttgggtatatacccagtaatgggattgctgggtcaaatggtatttctagttctagatccctgaggaatcgccacactgacttccacaatgattgaactagtttacagtcccaccaacagtgtaaaagtgttcctatttctccacatcctctccagcacctgttgtttcctgactttttaatgatcaccattctaactggtgtgagatggtatctcattgtggttttgatttgcatttctctgatggccagtgatatgaatattttttcatgtgtcttttggctgcataaatgtcttcttttgagaagtgtctgttcatatcctttgcccactttttgatggggttgtttgtttttttcttgtaaatttgtttgagttcattgtagattctggatattagccctttgtcacatgagtatattgcaaaaattttttcccattctgtaggttgcctgttcactctgatggtagtttcttttgctgtgcagagctctttagtttaattagatcccatttgtcaattttggcttttgttgccattgcctttggtgttttagacatgaagtccttgcccatgcctatatcctgaatggtattgcctaggttttcttctggggtttttatggttttaggtctaacatttaggtctttaatccatcttgaattaatttttgtataaggtgtaaggaagggatccagtttcagctttctacatatggctagccagtttcccagcaccatttattaaatagggaatcctttccccatttcttgttttcgtcaagtttgtcaaagatcagatagttgtagatatgcggcattatttctgagggctctgttctgttccattagtctatatctctgttttggtaccagtaccatgctgttttggttactgtagccttgtagtatagtttgaagtcaggtagcgtgatgcctccagctttgttcttttggcttaggattgacttggagtgcctgtgtttttttaaccagtcccctattgctggtacttgggttctttccaagttttttgctattgtacatactgctgtgtttaattttcccccatattgtttgcatatttatgtaacatatctggaaaataaatttctggaagtggcattaataagccaaatagcacatgcttttaaactttgggtagatattgccaaactcttctccaaaaagttgcaccagttgtttcttcatcagtttccatgtttcagttttccatgtttctctgtaatggaatttatcaaagtgaaacatttttgttgatagggtaattgaaaaatgttacctcatcatttcaattttatatttctttgtaaagttgagtagtttttttaatatctattaattgtgtgtatttcttttctttcttccccccgcccgagacaaagtcttgctctgttgcccaggctggagtacagtggcatgatcttgactcactgcagccttggtctcctgggttcaagctgtcctcccacccaagcctccctagtagccaagattacaggtgcatgacaccatgcccagttaatttttgtattttttgyaaagacatagtttcaccgtgttgcctaggctgctctcaaacacctgggttcaagcgatccaccctctgggcctcccaaaatgctgagattacaggcgtgagccactgcacctggctatgtgtatttctttctctatatattgtcttttggcagtgtagaaatttttgcaacacagaagtgtttttacattttcaggtaacaaatctgtaatagtaactaataatattttctttttcttttttttttttttttgagacagttttgctctgtctcccaggctggagtacagtggcgtggtctcggcacactgcaacctctgctttccgggttcaagcgattctgcctcagcctcccgagtagctgggattacaggcgcccgccaccacaccccgcaaatttttgtatttttagtagagaccgggttttgccaggctggtcttgaactcctggcctcaagtgatctgcctgcctcagcctcccaaagtgctgggattacatacgtgagccaccatacctggccgctaataaatttttgagtacatttaatatcagtgttttaattactttctatgtatttactcatttataattattgtcaggtttgacagtctttagcttttgggattttgtgtcatacagagatctctgatgataattaaatcagtaaatatgtaattccaaaattattttttttaatattcaccatgtcttccttttctttttttgagacaggatctcgttctgttgcctcagctggagtgcagtgttgcagtcatggctcactgcagccccgacctcctgggcttaagcagtcctccagcctcagcctcctgagtagctgggaccacaggtgctggccaccatgcccaactaattgtttaggggggtttttttgtttgtttgtttgttttggtagagatgggatcttgctctgttggccaggctgatctcgaactcctgggctcaagcagtcttcctgccttggcctcccatagtgctgggattacaggcatgagtcagcttgcccagcctgtttttgtcttttgttttgtttttgttttttttttatttgacatggggacttgctctgttgcccaggctggacttgaactcctgagctcaagcaaccttcccacctcagctcctgagtagctaggactacagacgtgccactgctcccagcttactattttttaatgaaataggaaggtgctacacatgcttattttataccttgctttttaaaaacataacagtatatgtagcatctcctcccatgttactacatacagattctccttattctttttagtaggtacatagtagtccattatgtggatgaatcataatttaaccagttagtctcatgttgataaatattttaattacggtttggatagttatactctaaagagtagacaagaaagagaacgttatttaatccttcaaaaaagatcaataaacataacctcacaaaggcatataatctcccatagggtaagtgagctggttgaggttcataaagtgacttatttaactgtgataaatttttagtcctatgaaaaactatgtattctataaaaacagaaagtaaaaggtttgatggagaagggactacttcaggaatgtgtgattgtttgtgcaaagacttagatatggaagagggaaagcacctgtataaaataagagattattcaatttgtgaagaaggacaaggacaagtaagtagatgttagagttggagaatatttttcttaatcttgatttttcttgctttctatttatgtttgtataaatattgactgagtatctgatgttgaccgggcctggtataatgctggtgaataaaaaaccagttctactctcgaaaagttttctgtcctaatggtgataggcagacacaagatgtgaaactccaaaaaagcttattcatttgttaattcctaacacctggcacagcatatggccatagtagtagacattctrtaaatgactctcctagcatctaaaaggtgagaagataggaaaagcactgtaacaattcagatgaaagtgatctgtgcaggcacactgaaggagagaattcgctatcaatttgagtaatgttttggtgttaaaaactgtttggtaggccgggtgcggtggctcacgcctgtaatcccagcactttgggaggccaaggcaggcagatcacgacgaggtcaggagttagagaccagcctggccaacatgataaaaccctgtctccactaaaaatacaaaaattagctgggcatggtggtgggcccctgtagtcccagctacttgggaggctgaggcaggaggatcacttgagcctgggaggtagaagttgcagtgagctgagactgcgccatagcactctgacctgggcaaccgtgcaagactccgtctcaaaaaaacaaaaacaacaaaaaaactgtttgatagctatctatataagcaacataataaaagtcaaaaataagtcccaaattttggttatagatatataccagatgtatgcctacataagggtctgtggaggagcattatactttacataaaagcagactccagtgattgtcctttatggaaatggctcattaaatttataattggaagtgctggaatctcaatattgctgttccatttgttacagggtaaaggagctggaagtgcgaaaattgatgcatgtgagaggagatggaccctggtattactatgagacaattgacaaggaacttattgatcattctccgaaagcaactcctgacaattaagcatttttttctccaaatacaaagtatattctctttattggaaaataaattaataaatatattctgtatttttgctctccgtgaaaaacaaaagagcctctgacattactgtctctcagtgttggttcagattgaggcttttgtttgaggagtttggcttccagtccccaaagaaggtttaaaatgtactaataaaaactggagaaataggaatttgtgaacycctaaaattgtagcaactttgaaaggttagtgttttatttacctgacaaatggaagttatagaagtctaataatgttaagcaccagtaattatagtattttgtacaaatgcctgtactgtagatgtctgtattattgaggggcaactcaggattttaagttccataaagtattgaaccaactctaaaatgttaactccttaataaacagattctcagtaaacaaattttaaagtttataatgctttcatggtttttttttttgccatgtattgttcttttttaaactacacacagacacacagacacgtacacacacacacacacacacacacacacacacgctcttttcctagatgcaatctctgggatcccttagagtccttttttggggaagtagttgcactaggtaatgtgattcctgcagagattataaaatgtgagtaaaagctaaaaatgactcatttattaagcatttattgtctgctagacactatattaaataactgcattttttaacattattttcttttctttttttttttttttttttttgacgaaatcttgcactgtcacccaggctagagtgcagtgccgtgatctcggctgcaacctccgcctcccgggttcaagcaattcttgtctcagcctcccaagtagctgggattacaggcacccaccaccacacccggctaatttttgtatttttcagtaaagactgtttcgctgtgttggccaggctggtcttgaacttctgacctcaggtgattggcctgtctccacttcccaaagtgctgattacaggcctgagccactgcacccaacattattttcaaaatgacaagaggtagtatttagtacctgaggctcagatgttaaacacaaactcagtatttacaaaaataaacatttaaaacatttacacttcaacttccaaaatggctttttaccataaacattcaggattttcaaacctgtaacagcttatcaatgcatctcatcttagaagtatgttttacattcttcataaaaataaaaatgaacccaggcttcctaagattcaggccagtgggtctccacttaaggccaaatggagaaataattttttgctgcctaaacacacaagtgaattgaaaagccacaggccattcattcaacaaataactttattatttttattgataatgtacttgtaatgtgctattttgatacatgtatgcaaagtataatggtcaaatcagggtatttgaatatacatatatttcaaaatatagttatatatttcaaaataagatatagcaagttagaagtatatataagtatattattatatgttattgttaactataatttacctactgtactatcaaatactagaacttattccttgtatctaaatgtattcttgtaaccattaactaacttttctgaatttcctactctccccttcccttcccagccttgtaaccacctttctactctgcctccatgagacccattttttaatctcccacatatgagtgagaacattcaatatttgtctttctaggcttggcttatttcacttacattaatgacctccagttccatccatgttgctacaaatgacagaatcccattctttttcataatattgtccatacataccacattttctatatccatttatctgttgatggacacaggttgcaaagggattgctggattgtatgataattctatgtgtagtttcttgaggaaccttcatggtgttcttcatagtggttgtactactgtacattcctaccaatggtggatgagcgttcccctttctccacatcctcacaagcatttgttattttttcttttttttcaaatgaacattttaactggggtgagatatcttaatgtggtattggtttacatttccctaattatggttgagcattttttcacatatctaatggccattcatatgtcttcctttgagaaatgtctatacagatctctggccctttttttaaattttttttttttttgaattggggtcacccagtctggaggtgatctgggcttccacatcctgggctcaagtgatcattccacctcaggatgacccaaatagctaggaccaaaggcgagtgccaccatgctcagctaatttttttgtattttttgtagcgactgggtttcaccatgttgcccaggctggtcttgaactcctgtgctcaagtgatccgctcaccttggcctctcaaagtgcaggtactttaggcgtgcctggcctttttgtccattttatttttttgagatggagtcttgctgtgtcacccaggctggagtgcagtggtgcgatctcgactcagtgcaacctccgcctcccaggttcaagcaattctcctgcctcagcctcctgagtagctgggattacaggtgtgcaccaccacacccagctaatttttttgtatttttagtagagagggggtgtcaccatgttggccagggtgatcttgaacttctgaccttgtgatccacccaccttggtctcccaaagtgctgggattacaggtgtgagccactgcgcccagcctgtccattttttaatcaggttatgggttttttgctattgaattgtttgagttccttatatattctggttatgaatcccttgttagatggtgtgttaggccattcttgtgttgctataaagaaaatcytgagtctgggtaatttataaagaaaaaaggtgtaaatggctcatagttctgcagactgtacaggaagcatggcaccagcattgcttggcttctggggaggcctcaaggaactttcactcatagcagaaagcaaagcaggagcaggcacatcacatggcaagagagcaagagagagaggtggaggagatgccacacactgttttaaacaaccagatctctcaggaactcattgttgttagaaaaggaattaaaagaaatcaaagagtgtgtaagcagaaactcagttgtacgtaagaaaacccaattccccctgagaaagagaaagagctggagtcctttaaaaattcactgcctgtttttctggtggctagtgagtgttagctctcctcccttcccaggcattgtgaagaccctgtttccctagctgtgcagctgcaaggtcactagacagataaactcaagtcgcaaaacatgtttttccttgaaaagtaagaaatgatgtaatgcatgtcttgactgaataactgtctttgtttcttgcttctgtaatatgcttccccctgcacagatctccccctgccccacgaaatgcttaaaagctaacttaactctttgttcagggctcagtcctttggatgttaatctgactgggccggagcacctaaataataaatattctcctgaaccccatcggtctctctgattccttaaaaatcctgcaacattgtgaggacagcatcaacaggatgatgctaaacgattcgtgagaaatttgccattatgatccaatcacctcccaccaggccccacgtccaacactgggaatcacatttcaacatgagagttggggggacgaatatccaaactctgtcatatggatagtttgcagatattttctcctactctgtaggttgtctcttcacttttttaattgcttcctttgctctacagaagcttttgtagctcaacataatcccatctgtctttctatgtttttgttgcctgtgcttttgagatcttacccaaaaaaatctttgcccagaccgatgtcctctatcatttccccaatgttttcttttaatagttttatagtttcaggtcttacatttaatctttaatccatttcgagttgatttttatatatagtgaaagatggggatctagtttcattcttctgcatatggatatccggttttcccagcacaatttgttgaagacactggcagctatgtgggatcttttgtagttccatatacatcttagaatttttttttctatttttgtgaagaatgtcactggtattgtgataaggattgtattgaatctgtagattcctttgggtagtacagacattttaacaatgttgattattccaatccacgagtatgggatatctacctttccattttttggtgccctcttcaatttctttaattagtgttgtatagtgttccttgtagagatctttcacttctttggataaattcattcctaggtttatgttgttgttagtttgttttgtttttagatttccctatgcaatctaattaccacctcataattctgccaaaggatttgggagaagggcatattttctctaaagcccctgcttatgcaaaccagtttgtagaagagggataaagagaattgaagcagatagctctcgtacatggtgatagtaaatgatcctagatttatatgctttgatatattcaccttaaaaaaataacctacaggatgttttttgacagttgtagtttttactttattttctcctttctactattataaatgtaagaaaagcttagaataaaaaatatggaaaatatacaataaatactgataatcctaacgttcataaagacatttcagaagtttcctctaggctttatttaacacagctgggatcacgtataaaaaatgggatcagcttttgtggtggagtgcgtggctcacgcctgtaatcccagtactttgggaggatgaggcaggaggattgcttgaggtcaggagttcaatgccagcctggccaacatggtgaaaccctgtctctactaaaaatacaaaaaattagccgaacctagtagcatacacctgtaattccagctactcaggaggctgaggcaaaagaatcgcttcaacttgggaggcagaagttgcagtaagccaagatcatgccactgaactgcagcctgagtgacagagcgagactgtctcaaaaaaaaaaaaaaaaaaaaagtaaaataaaatgggattgaccttttttttcttttttaagttgtaaagtgtttcttgggaaaaaaaagtgtcaattaaagctaatatatgtgtttatattgattcttatgctaactttttaaaagttcaaatagttaaacgtgttcaatattggtcaagggaaagaaaaaggcacttggagtaagcacttggagtaagctatggggtcccaaggtagcccaagggttactggaatgactgtgagctgtaacccgaggatgcgtggagggaggggaagaataccatattccaagtagagaaaataagaggcaagagaaaattgaaatgaaaaccgtttggagaagcctgaaatatagggcataagtgagtgaggtgagagtgcggatgagattatttgcactatttcagctctcggtgaagatttggatctcatcctaaggaccatgagatgtcattgaagtgttttaaatggggaaatgacatgattggatttgttttttaaagatcacgctggctacatggcggagaacaaattaaagatagtgagtgtaaattattcattctcaatggaatcaatattatccttaaaggggacaaaaattggttcttgggggataaaaagatcttacttttttatgtacaaagcatagctatacatacatgagcagatatatagtacatttgtggtattaaaattttatggtaggggaaggaacaatttggggaaaaaaatctaacatgctccatagggggtgatagtggaaaaaatgattgagaaaaactgacataaatgcagggaaaaccagttggaaagttgttctgatcatccaagtgagagatggtgatcacaaggtgaggccagtagcaatggggatggatgaaaacaaatgtaagaaattgaatgatattgaggtgatagaattaacaagacttggtgaatcaactgagtgttttgggaaatggaaataaggagtgaagcataaatcctatttctggattaaccaatggggtattgctgctgtttgctgaaatggggaggatcgataggagaaacagttttgatacagaagacgagttcagttttggacttgattttgaggtgctccagatccctgcagaccttctctcccatatagtgtagggagataaaaggacctaggacagagtcctgggagacagtaatattcatggcaaaagaaaatgagaaggtggtgtcacagaagctaagagaagaaagtgttttgagagggaaaagtaaggactaaaagattaaaagagttgatttagcaacccgggggccattcgtg

SEQ ID NO: 93953 - DNA, 226410 bp, Homo sapiens
  misc_feature (1)...(226410): n = A,T,C or G
ttctgcagctggagaggcactgcagggctgaagggctaaactaagagggtgacgagtaaagagtctggtggccctctgcgagaaagcacaccctgggctgaggaataacaaactcaaagagtccgaggtgaaaatgtttacataattactccactctagacactgtcctgctcaccagggatatggagttgagaatgtcaacagttcttatggtctgtagcctgaacatagtttccttaatattatttgtaacttagtttattttcacataagcccaagtgctatattgaggtgttcatattttatttctattttctcaaatttggaaaagagaatattaaaaaatcaatctcttgggatacgtctaatcagccaaaccttctatacttaggtttttagacaattgcttttatatgcataccttttggtagctgcattactcaattcttcttttgtattgcagtcagaaaaacgaagtgcaatacgtgtagcttaaaaagtagaaaaaacagaattttgtataatttgtgagacagctgcttagaaacaacttccactaaattttacttgatcaatatgctttctggggctaggagaagtagctttagtaaacatctaggatattggtgcatgtctctaactcaaacggatttgccaaaagagaaatgactttgttatttgatgaagtcagtattatagcagtttcaccaagaatgacaaaatattctggaccacttgtttatttgccacaatatgtcgtgaaataattttttaaagtaatggatattgtacttcttaaagtaaagaaatactgtagaatttcaaatatattagtagtggtctttaggttaataaaatattgttgcaatgatacacggagatcctctctattttttatgcttgcaagctctttggcaaagtctctcaggattttttttttttggcatgagctggtaatatttgtcatgtggttatgaaattgcagaatagagtcaagtcagaatgatgacagtgcaaaaaggactgtgttagtactaattttatgtagtgtatgtgtgatttcccgtcaactgtcaagaatttaggttgactaattgatccagttttgcatattgtaataacactatttattttaaggcaaatccttctgatttatatatttagatttgatgacattggaggattctagaagctagtttcaggatacttttctttagataagggacttgtatccaatggaagaggctggttattttcatgaaagacaaagaaataattactttacttagacacacacacatacacacacacacacacacacactctctctctctcacacgatccttgaagcaaatacagtttaagtaaaattattatcttgcaaacaattgaattattgagatttctccacattttttccttttttcctcttactttctaactactcctaaatcacattaatatgtcctttatatactatggaattgccatgactgtaatttcttgttattctctaatgtttggctttttctccatgtttaagtttctttctggcattaagtttgagacttaagaagagtcagttaattccatcatttccctgtgctagaaaactcaagaactggcaatagcacttacttagatgttatttgatagaaaggaactttggctctaagaagtaccaatcttgataggaaatttaaagaattgaaaggaaaaaggaaatgataggtttcttaactaatgtgacttcagatcattttaccatatcgtaacacaatagtactaactcaaatccattttagactggatttaaaatcacttctgctcatataaatttattctatttatttatgatgtagatattagtcaggcttattttttctagataatctgaagtcaagctgtttggtgaaaatgacagttcatttacgtgttgagatatgactcatatgaggataattgctttgaaaacactgagtagggaatgccttcaaaatcctcctatacttaccaatatcctttcgttgcaacaaatttcactaatataatatgaaaaacatataaatgaatcatgaccagttgaaatttattgttttccactatggtcttactatggcaaataaagatgaggaaatactcagttccagtttgcaataataaaacttcacagtaggaagattgcataaaaatgagaggcattttctaggaagcaggttaaagtggaatttttaaaacgatgctatagtaggtataagtaagtccagaaatattaatttggaaggaatttgactggaggttgtaaagggtcatcagaatggaaaaaaaagaagtagggcaaatcgtgtcctccagttctcacttgcaaatcccactgaaggcagtggaaggtttatggaaatacctgaaagacacatttgacctagttcaaaagctctattaaattagtattttaataaattgtcctagataagtcttgtctttatggtccttttaacattatttcacccatagtttgcttgaaaattacagaaaagaggaaaagctaacaagggacatttgacttctcctttaatttaaaagatactaagatactttgtctttttcacaaccatgctgagaaaatgtcctttgtaaagaaatatatgaatcctaagtaagctttgcgttttttgatgcccataatatgggaagtacagacagatataaaatgtatagttctgttacttagcttgagggaattcagtccctgaaatgaaactgtgtctagaactgatggcatctgatttaagttttattcgataatactgagcacataaatgttatcatagttgtttcctcaggatacaagaaagcgctaggtagcctctttctttctgtgattcatatttactaaaacctctattttggcctgatattgcccaagatacacagcaatgtaccttgtcaggggtaccagatttagtttctggaaatgcaggagcaaagcatcacttaatggcattttggagttagctataaaacaaatttgatttccttaaaaagataggctttgataagcacttaccactgggtttcagacctatctttgaaggtaggaccaaggaggcttcctggagacatccattaaccgaaaagggagccaggtgagactttctccactcaaaactatgtcttatccaggaggaataatttggagtatagactctggagccagtccaaccaagttcacatccctcctctatcacttactagctttgtgactgtcccagccactccagctgtggctgaaaggctccaacgtacagctcagactgtggcttcagaaggtggaagctccaagccttggcaacttccacgtggtgttgagcctataggtgcacagaagtcaagaattgaggtttgggaacctccgcctagatttcagaagatgtatggaaacgcctggatgcccaggcaaaagtttgctgcagggacagggccctcatggagaacctctgctagggcagtgcagaagggaaatgtggggtcagagcccccacacagagtccatactgggtcactgcctagtggagctgtgagaagactgctaccatcctctagaccccagaatggtagatccactgacagcttgcactgtgcacctggaaaagccgcagacactcaatatcagcccgtgaaagcagctgggagggaggctgtaccctgcaaagccacagggatgcagctgcccaaaaccatgggaacccacctcttgcatcagagtgacctggatatgagacctggagtcaaaggagataattctggagctttaaaatttgactgccccactcgaattcagacttgcatgggccctgtaaccccgctgttttggccaatttctcccatttgaaatggctgtatttacccaatacctgtaccctcattgtatctaagaagtaactagcttacttttgattttacaggctcttaggtagaagggacttgccttgtctcagatgagactttggactgtggacttttgggttaatgctgaaatgagttaaggctttgggggactgttgggaaaacatgattggttctgaaatgtgagggcatgaaatttggagggactggggcagaatgatatagtttggctgtgatcccattcaaatctcaacatcaaattgtatctctcagaattcccatgtgttttgggaagaacccagagggaggtaattgaatcatgggggccggtctttcctgtgctattctcgtgatagtgaattaattctcatgaaacctaatgggtttattgggggtttctgcttttacttcttcctcattttctcttgccacctccatgtaagaagtgcctttcacctcctgccatgattctgaggcctccccagccatgtggaactgtaactccaattaaacccctttttctttccagtctgggatatgtctttatctgcagtgtgaaaacggactaatacagtgaccctactttgttttatctctctgagcttccagtatctaatttctttaaaaaattgatatgactacagggttttgtgagaatttaagggtaaaaatatctttggtgtggggggtggggggtggctagagcattgtgttttgaaatttagctctcatttttattttatatgaagcaccatcactcagatttatttcttaatccagttctccacctccttcattgagataatataatagagggttgtaagggggccctgaatgggagaaaggatatatggatgcagaaggagatgccacaagataaaagctgagagagctacttcaataaaaactctgtgaactctcccctcccaccgtctcttgataatagcctaacactatttgacaaaaggtaaagaaaggcattctctttattctgcaacatgacctttggggggtttctgtgcatcatcagggcagggtcaagcagcatccaaccatccacaggtgaaaaggcatggggccggggggaggcgggagtgcttctgaaggcgcgggtgggtgggtttgtggggctggaaaagaggaatgaaaccagatgccacaatgcaactgctctctctggtccctgagccctcctgagacactcccaggggttgctacgaaacatgatcaagagctgtgggttcagcaattgacagaaatgtatcaaatcactaagcatttcttgcttgcctgttacacattgggcatggtgttagcaatggtgacacaaagatgataaagacgtcgctgatctcaagtccttgtctggttcaaccacgtgccaagacattttaatactctgttgggaattctcaggcagcacaggcccaggcgttagcaaagcagccagggatttcagacagagggtgccatccagggtaagaaaatgaactttttgtgtcacatttgcattttcattccttaactaagagtatctgaaaatactgatggcacaaacgaactaaattcctgcttcagcaccaaatggatgaactactacggtttaagcattgaactagtcctaatatcaccattccagaaatgtcttagtattaatcaggacaagaaatagggatctctttcgcaagaagcgagactgcactccttcctttccttgtatacggaaaggggacaaaatccacagtgaaaggcctagaagcggcgcactccgcccacgggcggcccacgtgtccacctattccgcaccgcgccctgtcccatccctatggagcggggtctgccaacgctcgcgagagccctctcggcttccacgtttgccacgttccaaaggaccgagacaaactggaaagccgaaagaggctcgcgctcacaggcagctgcgtagcgcccgaacagccctaagtgagcaggggcggggagcgcggcagggtaccgccgcctcgtaagggcccttgcgattgggtcccaggcgccgtcactcagccttccgggggcggggcgaggccgggaaggggcgtggccgtcgggcggcgagccgcgcgctctcgccccgggagggagtcacaggttcgtacacgcgaggccgggcgcgcgcagccggcasgcgggtgaagtcttcccaggtgctgcaggcggtgctgaggcacagggtctgctgcaggagcagcggcccgaacccgctccagcggcccgccgccgccagcggytcccgcgtcgcgtgtgtacccccgcgcactgaaggaggtccrccagccctcaccagcccccgcggaccgtgcaatggcccagcgtaagaatgccaagagcagcggcaacagcagcagcagcggctccggcagcggtagcacgagtgcgggcagcagcagccccggggcccggagaggtcagaggccctgcggggcggggatctggggcctcgcctcggggtagggagccggctggcgcggcggacgctgcgggtgcatctccccaggtcccaccgcgcgccgcctccatcccccgcgacgctcctcctttaggcgcgcggggcggaggccgcattcggcgggcctggcgggcgggcgaggggccaggcggaccggggtccgagccctcgggatgctagtctcggggagccccttcccagcggttccttcacctgcagggcgcagccgagacagaggttgctgaacgactgtttcttggctttccgtggaattgaacatgggagtaagagaacaatttatcgtttgccttgcgtgttttggggagttgaaaatgagccaaagtcagggaaagtgagttcctgcctaaccagcagcgtttcagagcaactcaaaggaggtgaaaatgggggcgccggggggcagggggagggaagaagttgggagtgatttgaatgctctcagaaattattttaaatatttttgcttgtatgtagctttcttaatatgcgttgcagttgcctttaaaatagaatgtcatgaaatactgaacgagcgtctgtatttttaccacttttacttaaaataaaaatcgattggatattcacctttctcctcgtccgtgtgcatatccagcagagagaacagatttttaaatctgtttcgtctcatatttcagtgattcttggtttcttttatacttcctttgactcatatttgggatattgaaactgcaatacacatgtgtatggaatgtgagctgtaaacttcacttgaagtgatttagactctttgttttctgagatcttcagatcatgcattcataatataccaagaaaatgaatcagctatagtcaaagaagtattttctttatagcacttgtcactatctgaacttgtcttattactttcatgtgtgttgtctttggctcattctctctgtatccccagctcctagaatgttcctttcccataataggtgctcaataaatatttgagtagtgaatgaatgaatggatttaaatggggaaagtagtgcattaaatccattgcacaaatttacattctaaggactaatatttgtattctaaaagtaaagatgtagacacagtttgaagttcaatgcaagcatattaattcacctttgacataagtgaaagtttgtgttcctttttcacttgttcttaaatgtcacttacttaaacctgcagagggatagattaattgcctcagccgactgaggctactcttttttaacatccctaaatgagaatgggttcttctcattgtgcctctaagggcactaagcagagaaagctgatgaacaactttaatgttagttgttttcaaaaggtttctgtagctatttgccagagaagcatgtcttcgttccatttcatttttgtgtttatgaggagagggctgattgcatctgagggaagtcactttatatggcctcttattggtgagaactaatactgggaaatgtgtctcacgtttctagacctaccccataactatttgaagcattttaacaggcaagagataggtttagraaatgcagtaacttaaattaacttctcctgactttcatagtcaggcattttagaacaaactctgcccatatttgaggatctacagccttttaagcattttacacgttgattctctaatagtcatgaaacagacatagtatgtaaaagaatatgtaaaagggaggaatgcccgtgatacgaaaacaaaagttgatattggaaccctgcatgtgacgtaatgagtattctttatccgcatatccgcaaccttttcttttttttctccagtagatactgagttcttactgtgtgccagatagaaggcactgggtatggaaaccatttccttccatcaccctaaacagttaaagtacagtgtcgtgtatagtaggctgtactcgaaagataaagccggcttttcttttaatgctgtttacctggtcattaaagtacggacgttgtgcgaaccatttccttctactgggaaaatcaaagactttttagcagtgtcatactgtgagacccatttagtttcctgctcaaatcatacagatgaggaaattaatgcccagagaagttgccgagttcattgaaggttgtttagttcatggaaactcaactaattactggaagaaccgagactaagaacccaggttttgttattcattttgccatgcttgaattttaggttctctagtatgtaattggagttgaactagattatcaagttttcttctggctgtctccatgagtactacatttaattattggagaaaactatgcttttgtcctatcaccaattacatttcccttgacaaaaattctatttgaaacactatttgaaattttagtttgagaagaagtatatgtgttcaaatagtacgttttttgatatgtcttacattgagagtcagaaaatgacggcattggtcacattaaacattattatttcttaagttgttgtgtaaacgtatggggaaaaaagaacccagtcatttgaaacatgcattttagggaaaaggtgatttcttttttttttcctggccaaactttatcttggtggtttttttgctgaaaagtgatgtttggaagctggaatttggggaatttatatcacagatttttaaagcaagtgtctgctttttattttcttcagcttaagctgaaaaatgataaaatggttttctacagagttcaattttacttttttttcagttttactctttataatataaaagaaacatgaataaattagacttcctacctttattttgcatatagaactggacttgcatggccagttgggcccaggggaagcctttttcaaatttattgatttgaaaatagtttgacaaagaaggatcatgatgtccttttgggcttattttgtagacactcgtatgtgtaatgttttctgtttgtttgtttagtttttcccttttgagtatcaccccttaactccctgtatctcctagcagctttccatctccctgtttattttgtctgggtgtcctgctactacattaacttttgccactaggtgtcactgtagaatatatcccccttttagtttgaagcttggggttatgtaacagcaggttttaattattattattatttaatccgtctgtatatactcaaaactattgatagataagcacttaaaaactcttagctactttttaactctctcaaggtgtctcagtagattgagcagcctttttgtttaggcttaattagaatgaaatatattcctgtactgcctgtaaaacattaacagcttcatttgatgagtatttgtcatttagaaacacacttctgagtttagtttagcttcctttttctttctactttgagtgtctcttagattactaagtaactgagggattcaatacactgctgattgcattgtggagcccttgaatgaagaggccctagcaaaattttctttctttagccaaagaccatcagagccaattgcttaatcctccattactcattctaagatgaaaacataggaggaccataattcttccactgcaagaaccgtcagctattttgtgttcagttcaacagcattttgtccatcctgaccaaatcatatgaaaccaagcactaaataatgttctgagggagtttatgaacacattttccagagaccagttaacctctggtggtctgtggaagtgaaagttctatattttggactatattttagtcttgctttaaaataatctgtctcatagagattattagaaaatgaatgtatgacattttcattttcagccagttatcaacagaggaacttggataaaggctcatagggtctatccatcttgttgttagttaatatcagatacttagcccctgagctctctggttccaatagaaaaacccttttctccagaaagctagtgcagtttgggagaaggaatatgatgacctggatcatatctgtgtaagaatcagaaccaagaatcgctaaaaatctctgttcccagcctccttaaatgtaaagaattattatctactttcttttcagagttttgatatcactaatgctgatttcatatgsctttgtgtttctcagttgtttccgttaaagtacgtctaatagtaggggtgagtgcaaaactttggagactataaaagtgtagatgtcatcaggccattgcatgctttgacttttttgatgatttattcttatttatttatttattttcatgttccatagcatctttgtgttaagtaaaatgtatattcttgagatagagtttatactatgctttgaggactgctcgatacatttctctcagcttctggaggtgtaagtatccatttgcacatcaactttcaagttggtgatttgcccttaatggctcagaaatctgtaacattattttatcttacccaggctcagatatatttagtcttttgaggtaactccagccactgttttaatatcatgaaaatatgcagcttagtttgtggcttggatacttccatatcacctctaaatggcttgacttcattctgtaccaaggtacaaaaatgtttttcaaatgaacttctctttaataaaccctgtatgtacatataacctatgtacaccccacctaaacctccggggaaaagcctcagccatctatcgggaaatgtggaggtgcaagggctgcttgcttcattatctgctgccagtgtctgctctgcactgcacatgtgggtgtgatgagtttctctggttcggtcctgcagctctggccatttttattagaggactaaggattcaggatgttcttttcttccctgtgtaccactgtgggagtatagtctggaggccagtgctttaacttttttttaattatactttcttctggtactgctgggagccaagatggtattttcttgttagtcattatttttaaaattttagtattttattcccctgatgtgagggatgcttcaggcttttgtcctgcatttgatctttgtttttcagggatgtgtcttggttacctttggctgatgtggttatcttttaacggcaaatcactgaatgtaattcagttcctatcaaattggccacagctgaggacaaatttggtttagataacctattagactcaaaggaaatgttgagctcccttggtgaataactctttttaaaaagaaaatcatcttttgaaggatctgggctattcggccccctgtgagattcaggtcacttgcctagtcatgtgactgtcatcatctgccgtagatactatgtgtgctccagagcggagagcattggtgaattgacttggttgaggggtggggggctggggggtgggagtggttgctgtccagttatagtcaggtttccaagggcagccactatctctgtacttggagaaatgccagcacttctctcctacatgtgtgcccacacgttgaacccagtgactcatcctgtacttaagaccccaaggatcagtcttaaatttaaagtaggagaatatcctttgataattttatttcacaaccagcattgttgtaactgccttttctcatattttacataggtttgacagccatttctaccattccatagtgcagagtcactattattttgttgttctatcctgtctgtaacttctttttcttatttattattcttctaatatacagtttttgtccctatctttcacaggctgctttcaatttcaattttcttggtatactggaaagactcttttggtcttagtttcacttgtaaattttatttaggacacttaattttttgacttacataaacctcaaaatctgtgttgtaaatatttgttgaaagaatatctagcatttaactacttttccattctttgaatcaagtcaatttgtataagatgcttgtcactgagtttttgtaagttgtttcatrgatttgctttttggcagagagctagttctctaacctttataataaaaatatttctgtgtattgctctttaaaattgtatgtatttgaaatagtacatatttaagcctataaataattgtagagagtaatgcagtggatgcccatgtactgaccatataggcgaagaaatgaaacattatcagattcctagattttcctctcctgtggtattccttcctaaccattgttaaacattttatggtagtcattatcataaatacaggtatatatgcacaaaataatatataacatgtagcacatacacattatgtatccacacatgtaaactgtatctattattaaatcaatgtatttgaaaactgcccaggaagtatatctatatccctatgtgtagaaatatacctatacacacacacacatatatgtatatatactgtatagcacgtattaaaagttttgtgaacaggcttctacttggcatactattttgacagcatttgtttgaaattcctccaaactccagttctttattttcacatatgtagttctacaccatatgaatatgccttgcttttcatttagccatcctatcgcaggccactttttttctttcaaataatgctgccctgtacatgtatrtgcctatctctccccatgcatacatgtctgagtgtttttctagggcataatctggaattggaattgtgggtcatagaaagtacacacattagactttactggatattgccattttttaacccccaagtggttgtatcaacttacagttctgcccctaatgaataagagcttgttctgtgccatcatcacattgtcaacatttggtgaagtttaatatttgccagttgagtggctgtgaagtagtacttgagggtttaaacttgcatttttctaattactagtgaagttactggtaagagtagccttgtgtttcctcctttgaattgcctgttcgtatatcttgcctattcttctgtttttgttttgtatttgtagtattgataggtagattttttttttttaatatcctgaaccttttgattatttttgataaaggacttctcctagtctgtgtttactcacattttcattttttatggtatacgttgttgaacagaattttaagattttaatatattaatagaatttttccattttgtactttgtggttcacacctttatactttttgtaagacacataacacagatgttatgaattattcttgtattttcctctaaaagatctgaaacgttgcttttttacatttagatctctgaaccacctggtgtagcattttattgtatattttgttattagggatctaattcagtattgttttttaaaaagggccaatgagaatgtcctgtactgttagttgatttgtcatctttttaccgtagtctgcagcatcacctcttgtgtatgaatacgtcgggctctattttgttccaggcatgtagaagcaacaccaaactgaattgctcactatagctttgtaatgagtccacatatctgatagggcatgtccttctaccctgcctttttcactattgtgtttgctgctttgggacctttcctcatccatttctctagattttagaatctgcttatcaaatatgttcatgaaaaatatttgagaatttttactggcattgtattgaatctatagaacaatttgggacaaatacagatgtttataatactgaatcttcttatacatgcacctggccggctggcctgctttctcttctttcttctttcttttttcttctttcttctttcttcttcttcttcctcttcctccttcttcttcttcttcttcttcttcttctttttttttttttttttttttttttgagtcatgacctcgctctttcacccaggctgcagtgctgtggcagccttgacttcccaggctccggtgatcctccgacctcagcctccctggtagctgggactacaggcatgcaccaccatgcctggctaattttcttatttcttgtacagatggggttttgccgtgttggcctgtctgctctcaaactcctgggctcaagtggtctgctcatctcgacttcccaaagtgctgggattacaggtgtgagccctgcacctggcctataatttcttatgtatttaagtctgacaatttttataatcttatttgaaagtcatatacatcttttattagattaagtctgggtactttgtattttaaaaaacattttcaatagtatttttaaattaacattttttaatgaaacttaaaaaatatgtatccaaattgaaagagttctgtaatgactccaccatgtagatgctacagcggttaacattttgatagatttgctttgtcatgtctattagtcaatcttattctttcatgcctttcraagtaagttgcaggtattagtatatttcactttcataaacatttacatgdgcctgtagctaactagagcttagcatttgtttttttttccctctgaggtaaaattttcacgtagtgaattgcacaaattttagtgtctgatctgaggagtttttatatccatttctacctttgtaaaacaataacctattaggatagagaatattttcatcaccctgtaaagttctctcaagcccctttcttgcgtccacctctgccaccagaggcagccattgtactacattttttkatcatagattagtgttttctattctagaacttcttttgcaagtacttttttttgtaaagtctcctttcactcagcataatattttttagttcgtttatgttgtgtacacggtcacttgttcctttttattgtcaaatagtattccagtgtctgactatagcacaattttttttaagcttttattttaggttcaggggtacatatacaggtttgttatatgggtaaattgcatgtcacaggggtttggtgtacagataattttgtcacacaggtaataagcttaatacctgctgagtagyttttttgatctgcaccttcctcccaccctccaccctcaagtaggccccagtgtctgttgttcccttctttgtgtccgtaggtagtcaatgtttwgctcccacttayaaatattaataagaacatggttctctgttcctgtgtcagtttgcttaggatagtggcctccagctccattcgtgttgtatagcacagttttttaaccccatcttttattggtggacacttgggctagttttgggttattatgaataaaattctatgaatattatagaagccttttttgacatatgtttttatttctcttgagcaagagagggattactgggctatagggtaggtgtatgtttagttttattaagaaactgttcaactcttttgcagagtagttgtacaatatattttatactcccactaaccatgtgtggaattggttgttctacatatgtaccaacatttggtggtgtcagtctttttaattttagccattctggtgggtatgccgtggcttcttactgtagtttacatttgcaattccctgatgaataatgatgtcaagcactttttcttgtgcttattggctacacccattatctttagtgaagtttcttttttgcccatttctaattttattgttttttgttgctgagcggtaattctttatgtattctggatagaagttcttttcagatatatatagcacatatttctcccagtctataacttacctttttatttttttatttttaatgctgatatttattttttcttttctgtttttgctttctgtgttctaagaaactgcacattctcacgtctcaaagctatcctcttttattttcttctagaagttttatagtttcagtttttatgtttgtctatgagcattttcacattaattttgaattagatttatatttttctatatggaatttcagttctagcaccatgtgttgaaaagactttgctttcattattggattgcttttggtgcctttgtcaaaaagcaaatgacagtgtaagtataaatctgtttctgagcccctctgtttttttttttttttttttttttttttttttttttttttgagacggagtctcgctctgtcgcccaggctggagtgcagtggcgggatctcggctcactgcaagctccgcctcccgggttcacgccattctcctgcctcagcctcccaagtagctgggactacaggcgcccgccactacgcccggctaattttttgtatttttagtagagacggggtttcaccgttttagccgggatggtctcgatctcctgacctcgtgatccgcccgcctcggcctcccaaagtccctctgtttttttgttatctgtttgtccttatgcctttactttatcacagaatcttgattactctagctatacagtaagtgttaaaactaggtagtgtaaatcctcctactttgttgttccttttaaaatagctctaaatagtgtagatactttgtgtatccatatacattttagaatcaccttgtcaacttccacagaataaagcatgctagggtttatgattaggattgcattgactccgtagaccaactttgggagcattaatcacagtgatattgcacattctaatttatgatagtggtatatttcttcatttgttaggtttttagtttctttctgcctttttttttgtagattttgctatggagctctttttaygcatttttctgttaaacatttttctaaatattttgtattttttgatgctattagaaatcgtatttttwaaatttcattttcccattatttgctgctaggatgtagacatagaactgttacatgcaccttatatcatgtagctttgctaaattcatttcttctagtagttttttttaagaaaatagattctttgggattttctatgtaaatatcatgaagcccattaatagaaacagtcttacttcttttccagtcttttcttgccttactgcactaattaggatttccagtatcatgttgaataccagtgatgagagtagacatcctggctttgtttctgattttagtggcaaagtatttagtattttaccattaagtaagtaaaatattaactcagggtgttttgtagatgcttttcattggattggggaaatttgtatttctaggttgagaattttgtcaaatactttttctcactcaaagtcccacttggttgatttgaattgtcctttttatatattgctttatttgctaatattttgtcagcaattttgcgtctgtgtttatgttagatgtgggtctgtaatttccttccttttttcctctcctcctctcctatcctctccccctgcttctccttctcctcttacttccttaagaattgtgattagtacggaatattttctctgcacctattgatattatatatttggtttttctccttccatactttagatggtaaatgataacaatagatgctctaatttaaaaccatccttacatttctgggaagaatccagcgtggtggttttatatattttcagtattattggattagttaatagatccatgagtaaaactgacccgacattttctttcctggttttgttatcaaggtcatattctagctgcataaatgaatttaggaagatttcttctttttctgttctttggcatagtttgtatagaagtagttattggggggctgggcgcggtgggtcatgcctgtaatcccagcactttgggaggccaaggccggtggatcacaaggtcaggagatccagaccatcctggctaacacggtgaaaccccgtctctactaaaaatacaaaaaaaattagccgggtgtggtggcgggcacctgtagtaccagctactcaggaggttgaggcaggagaatggcgtgaacccgggaggcggagcttgcagtgagcsgagattgcaccactgcactccaggctgggcgacagagcgagactctgtcaaaaaaaaaaagaagtagctatttggtaaaactcattggaacctttttgtcattttaccccaacactgggtgaggtgtgggtagacatgaggggaaactgcctttgctttttaaatgtttacaggactacttaaaatttctgtgtcttcttgagttaggtttgctatgttatattttctcttggtaggtacatttgagtaagttatattttctaaaacgttttctgtctttgaagtttcaaacttactggcaaaaagttgtgtatggttttagtgcttcttgtaaacagaatatagctattgtatgtctagtattaccttgtaataaaattccatttaaaatgactaaatactaagtttctttaaattgtaactatttcagatactaagaatgttttgctaagtttattaaagtaaaaattctttataaaatacatgggatattctaacatctgtgagaaggtaagccatttaatactggtaatttggtttaattgacttgatatgctgctcattttcctccttaaatggtaataactagcaataggtacattggtttgttaaaaattgaactttcttcatgactaaaatataatgcttattttcttgaatcttaagatttatttgattatttggtggtttctagctggtccatctgtttagttgtaaccagtaaatatacctggagacctagggagcctggcatggatccaaacatagcccaatgtttcaatcacatatttgctttgtaacattattaaaatgaaattaacttatatgaaggtggaaaactcttaagccccttgtatttattttatagtttttttctagaagtagtacactatttgtgttaataagtacccaagctaatttttagaattaccttgttatcagtgagacatttaagatgactgggtaggatagagtaacattgagtaagagcacagttcactagcttaagtacttttactgatttggagtaaacttgaaataaactatgtatgttcaacaccttcctgctcagctggtccttcaccagtgccttgtggtcttagtgtgcttttagcttatgcttattcgtattttcaatgccagctatttcacatcttcaccaacttcagccaatatcttactatttatctttcagttgtggcagacggcaaactacagtgagaaaaaaagcagaacagtggggccacctctgaggctggggatggggtgcaatggaaatggccatgagggaatttaagcagaaatattgatgttctagatcttgatagggatctgggttacaygttgtatacacttgttaaatctcagggaatgtatacttaaaatttatgcatttcattttgtgtaaatttcactttaaataactataaagaaatgtgtaactatagtttatgatactcatgccgaattatttaggagatgtgtgctgatgtctacagtttactttgcaatgcattatacaaacaaggtgatgatgtaaagggatgaataggtatgctacaaacaatataataccatgttaatattgtagcggaatctaagtgttatgaatcctttcagctttgttgtgttttgcaaattttcatagtaaaacattggggaaattcttacgttgtttgtttcctgtgaaatagccatttttgtgggtcagaaactgacaatttcctgtggttgagcccgacatatggaagcacattttgtagccattttattgaggcatctttatctgcctggatgctaacaggaaatagcttcatttttctcyattcgttgtgcacagttgggatagattaatctgtttgctcttggtagcagaggatcttgaccatctttgggacagaacttaacatctcagtcactctttttaaaagtctgtctggattagagctgatctcattttcggtgcttatgttcctgtctcccctttgcagcagggcaggaggggaaggagtgagtgtgctttcctgtggtttgcctttggggctgtgctggggaggaaaagggggtgaggcccctctcagtctcctctctaagttgataagattgactggcatggttattcacaagtgacaggtgctcaaacactgcccatgtgagttctttgaaaggcctggtatggaccctccctgtgacacatgacttggtccaccctcaatcccctgggcctccactcctggcagaatacttcatccccccttgctcttgggagcccattgtgtgtcagtcagcccttttgagtgaggtgctggcaaaatggtacaaacgctggtacttccctgctgccctcttggatttgtgggaagctgacattttgcctggagcttgagctcccttgtagccgtcacctttctctgtagccgtcattccccagttccctctgctgttcaactaggcatagggtgggccatggagtccgttgcttgagtggacatccactggggaatgagaagtcaatctccctgcaggcacccttggtctctgacaggcattctcctgcagagaactcttgatatctctcttagaaattttttaagtttttattataaaatggaattttttttcacagtcttgcaagtaaactatgtgccttcctctataatactgctttttaaaaatttttcttaggattttctagggttgatagagtgaaactcacagttaagagaaactttttgattttttttttctcattgcaactgtctggtgatttaatttaaagagtcgagattttgtgaattagaataatgaatttttagaattagaagagacatgagataatatacttcatttattcattatttttcattttactgaggcccatgaaacaagaaacttaccttgcagtacctgcagtacccctctctcatttgtcttatggygagggatttttggaatttataaacaaatatttgtaccttaccaagtagattgaaatatgagattcactattctacagaagtgtggttatttagcttttggcraagttgtgaaatttttactgatctgtatgtaggaaaagtcagacttcatgctgttagggtgaaggccgctgttagggcatcacctgtttattcagttgatcatgttttctgcaagaagttaggcaaaccatacagtctgaaggaatagttctcacaagactgccctcacttcaggcaccagctataattttggggtccccagggtcctctggagatcacaactgatatggcatgtcccagcgcccacttggttaggctgtccagtggccaaagcccccaggcaaagacactgttatcaggcagaacattcctgggatctggagaccccactgaagtaaccaagggcaaagaccagacttctctttgggtaaagttaattgtttatgcaatttttagttgcagccattgttggtgtttattactgttactcacttttattattaatttatttagtaagagcttgttggccatctgtgatattgtgaaatatatatttggtcttcttcttgtttcctgacatacatctcctaaaacccttgtggtctcccagagtcttaagagtgtctttcgctaataattgactggcggctaacagcccctagatagcttcaggatgggtgccggtcacaggaaagacaaaggcatcgttagaagattggaactttcagccccacccccaacctctgggaggagagaggggctaaaagttaacttgatcactagtgaccattgatgtaatcagtcattcctaagtaatgaagtgtccataaaaaactaaaaagatggttcctggagcttccagatagctgacaaagattaatagaggagacagtgtgcccaaagagggcatgacatgtgtttaagtttagcctaaagctgcctccttgcctatttcaagttcagcctaaaggcttttccatatgtagtaaatcgtaacgtaactaaatgaataaacagactgtaacctacccttgtatcagtcacagaattttagtcagtcacaggggtacaactgttcaaactatattcaaatatggcaaacactaagctgtagccaatccagctgtttctgtgcctttttctgtccataagtattacctgaccttgtggcagccctggagtctctgaactgcttctgggtcctgcccaattcaacaattgttctttgctaaattaaactctgtaaatttaatttgtcagccaggtgtggtggctcacacctgtaatcctagcactttgggaagtggaggtgggaggactgcttgaagccaggaggagttcaagaccagcgtgggcaacaaagcaagactctgtctttacaagacattttttttttttstaattagctgcatatggcggtgcatgcctgtggtcccagctactcaggaggctgaggtgggaggattgcattcaaggctaggagttcaaggctacagtgaactctgattgcactactgcactccagcccgggaaacacagtgagactctgtctaaattaaaatcaaataaaataattttaatttggccaaagtttttctttaaacacatggaaacttggcacttcttcccacataccttgccctatgcatctcttccatctggctgttcatctgcatcctgtgtaatatcctttataatcaactagtaaatgtgtttctctgagttctgtgaacccctttagcgcattaatcaaactggaggagggggtgttgggaacyccgatttatagccagttggtctgaagtataggtgacaacctactacttgtgactggcctcagaagtagagacagtcttgtgagactgagccctcaacctgtgggatctgacactatctgcaagtagatagtgtcagaactgaattgaattagaggacagccagctggtgtctactgcagaattgattggctgcagaattgattgcttacttgctggtgaggagaaatccccacatgttttagtgaccaggggctgcaggaatattctgtgttgactgtggggtgagagtacagaaggagaaaatatagagttttcccaatatccttataatatccccaagatgtattataattcataattgtatcaactgttttttgacctatggttttctactaactcaactgtaagacgtgtgttttataatttacaggattcttctgtgtatgctgtgctaatgaatttttgtaatccctcactttcctccccatttgcatctgtagggcactttattttaaatgctggattcttttgctccagaaagtgggaactggtggggaggagggccatggatcttttgctgtcaaaataggttaaagtcaaagagtcttcatggacacagctgtaaaccagtgttagttgtccatattggcagtgtgtccttgtctcattgccttgaaatttagagttaaagcaggattaagcttttttgtttcttagttttgaaaaaataaccttttttattcattgtaataacttttctttcaccacctcagagtttctcagtggacatagctcatcttcctttacaccttttgcttctctcaggccagtgagagactgtcttattttgaacaccatgctaataattatcacccacccatgtggacaattgaatagcccagaggaatgstttttttttttctatgagaccgtcttctctattgagtgctctgtagggagaaataattacgtttgcagagccgactcattaggcctggcttgaggaactagcctgtgaggttaactactatttatattgtgtttttatcttcttatcagtggtgtttgggtccatcacaaattcgtatgacaggcatgggtggacccatattttgattcrcattctctgctgcagtaaatcggtattagcacagaggtgtgggctagggcagtagctccttagctgggtattctaaaggatagtaaaggttccaaaaatacctggaggctgatataaatgggtattgctgatatttcactttcgtttactaatactgatgaaaatgcaagcagctttctcaattttgttttcctaagttctaaaactcatggcgccccttgtcattcttccagccatggtgcctttctacacagggacagtcaagagagcagcatctggtgtttgccaggacaggtggaggaggctacagagcctgtcctacctggccccactcatgtacagcccatgtgacagtcatccaagatcaatcagggaggaattcacctgagatagaactgtgaaaacttggtgaagggacgaatctgagtctgaaatcagagtctagaaaccactgggctgctttctgaatttctctctcttagctatttgtaggtcttttcctctagtgaattaattttaggatcattaaattcatggagatggggaaacctgaagtgacttgacagcccaaacaactaagcaataagttgctcccttatttctaaagtgttagcagaagaagtttgattactcataccatatcaaggatttgggaaggaatgtatccacttatttcacaagtgattattttattgagttcctagtagatagatccaagggaagtgtacagtaatgaacgtggcagattcagttccttgttgcatgaaacttacattctggaggtggaaagagattaagaaatcagttgttgtatagttgtctaagtagcagtgtaataacgtggtaaagaggtgcacactgctgtgagagtaagggaagtgaggaaggcttccttgaggaggtggtttgtaagcagagtgagctggcaatagctggggtgtgggggttgtatgtgatggtgcagctttgacatgggaaaagggaaaagtctgggctgagagcccgagacaggaaagaccatggtcaggtattttgggcaggtgtctaggcagctaggggggtgacacaacactaagactggagccacgggctggggccccatcacatggagccttccttgtaggccacatggaagatgttgtattttatctcgaaagcagtattaagacattaaaggatttttaacaggtcagtgctataatcagatttaaaaaatattttgtctgctgtatggagtagaaaagtgtatgctaagttattgaaatcacctaggagatgatgataacttggattttgatgatcacagttgaaagaacgttggaacttgagacagagtttctcactttttaatgtcatggcacacgcaaatgcttttaaaaactatgctgtggtaaatggacaagggtgacccaggtgctgaggagaatccatatcttggcctcgttgtaatcacccgtttgcaacagccagatgataaactcaattttgagaggtgagtttttgggacaaaagtcaaggatgaatcctggtgtttttgtctaagcaactggcttcacagaagtgcttctgagatttaggacactgaacaggaaaggggaaagaccatggtttattgtgtatatgcggaatttgaggtttttgtaagtcattcaaatgggatattgagtagacacatggttgtggagctcaaaggagagaaaaaggtaagtcatgtagatgatagctgaagtgaactagagaggtggcwtaggaacaagtattacagaattttcacacttaaaaatcaactagatgagagtgagctagcaaaggagactgaaaactacgaagtttaaagaggtgttaggagtgccacaagattctgaagtcatgagagtcgagggaagagagtgtggaagaaggagggagagttctgctgagagggtcaagtcagatgaggactgaaagttttgcgttgggtttaatgacatggaaatcattgatgtgacattagagccactatgctggagccgtgtgcagaaaccagatggaagcctacaggttgtaaggagtgagtgggaggttagaaaatgaaaacagagaaacagcggctctgtggagaatttcatctgtgatgggaagagcaagatgacatgggggctagcagcgggatggagggaaacctggcaaaggcagtgaggctgggggagaaggggcgagaagagacagtgcagagtgcgaggtagctgaggagaaactcggaatggatgcaggctagggcaggtttgtgtgctgggcattgggcactcaggatagcttcctgctgagggttctgttttctctgtgaagtatgaggctatggcagtttgagtatgaggaggtaggatacattgggggcagagaagtttgacatagtcatcataaagaatggcaaggtgagtttgtagagaatatgggagggtggcaggcagcaccgaggcccagctgaggctggctctgctgtgttcagttcctgatcttgattccgtgagcccagctgcccttgcctctgtggcgggggatacttgtgttcacccagggaggcagtcacggcagtccacgcagtgaactgatagaggagcaacaaaggctcatgagtcgctggagtgatgtaaatggtcaactgtggagtctaagatggccactgatggatatgaaggcaggaggtgaagaggggatatgcaggaagcagaaataagagaactacaggatccaagaagaaaatgttgaggaaacaaagtggagatgtaggaagttgtgatcaaagagtgaatgttcccattctgtgcgtcgtgtggtgagagaacctaaacccttgcatgtggaggtggccttccccagtggtggtggccgtgggagtctgtctaagcaggtttgacttgtgtctgcagagttgcattttgttatttggtaatactggttgtttagtgttagtttgaaaatgttataattctctcctgttaactttgggtacgatgtgtagatgaaaaaaattttgtttttgttttaaagaatcatattttcactatcttgtgacactttacagtcattatgatggagccaaaaaagcagagccttcttagcagggttacggaatctgttaggatggccgcttgtgtcatccaacaagaaacaaggtgtgaagaggaacgtgaattaggttgcgtttatgatgaggtccatggtaagaatgtaagaatgagtgttggatataaaatggaggcgaacaaggtctctggggatgaagaaatgaagcaaaaagcacctgtctagctggccacagggatagacattgaaatcacatggttacggctggacttggggtgtagaagacttccctgagcatggggtgggagtgggaaagtcactggaggtggtggatgacagcaatgaggcacagtggagggttggataattagatgtcatagaccacagaggagcagggagcagggttttgttgttgatgtcatcgytttctttttttcttttttttttttccttctggtgggtaaggaaatgatggtctggaaattggtaaaagcaagaactacttcccttccttgagaccctgagaattagggaccgctggtatagtattctttgtatgtggtccctagaccagcaacatcagatcatctgggacttagcaatgccaattccagggtcccactccagacctacaaaatcagaaactctggggttaaggtcggcatcatgtcttaacaagccctgtttgactctgacrtgctcagagtttgagaaccattgctgtaatgatagctgatccrgggtgaggggaaggaagtattcagtgctgactcatgagaaggctgatggattttcacctggaaggtttttggagggaggtagaaccctcgactcagtgggcrtatgtcctggctcccctggttgcgagtggcattaggctgatactaatggtctcagaacacacgttggaagtttggtctttgcttagacttggagttgctattagtaccagtagctgttacaaggaatagttaacttagtgtcattttagttgcgtttgctaaagttttaaaaacatgatttactatatgcaaattaagtttatttttaaacttttcataaacattctccatcataaaaatgaattgtcattataagaggcagttgttcagaattcagaatttattgttctttaaaaagtgttatgatagattaaatgatatttcagagggttttctcctgatctccatatctaaaatatcaggtatgtcattgtcattgtgaactgaggaggaaagacatttttatcaaaataactattcaattattgcaaaagacaaaagattaactagaggacttgtgaaagtgcttgataaagatttgtcaaggagaaataattggagctgtgttgaagaagtcttggggtaaggtataatcacattttaatagctgtgattcctacagtttgacgtttagctgtagacattctgtaatttggagtggagctgaccttgcacaggccagtaaagagaggagaagaaaccctaccagctccagcagttgcaggggcagatgggattatgaaacgagctctaaattgggggtaaggttatttatgcactagtcacgattgaatcaatagaagtttgtttcactgatgactccaacaaatatttgcatgcctagtttgtgcggagacccattttataagcaaggaaattcaggcctagaagtttgatgacttcccccaaatcaaatttaatggagaagccgtgaagcaaatccaggtgtctaagtatgaaagcataccaagctgcctgctggatcagtgtaggggtttggtttctagtggtctcacccatgggggtatcgtgttgctgtcattctccctccaaaaacaacacaatgaaaggaagcttccagaatatttgtcttaataaatttgtatggtgacgaaatggtgggtcaccttaacccctgtcaacaagtgattcattatcatttaacaatttagcaagcactaagtttagtgggacagatctttgaagaaaataatgggggaaaggacgcttggccagagggcacctgagaccattttgtttagttggccatgatgtctacctacttcactctgtcctaaacctggaccatcaaatgttggtaccataggttgcagactatggtaccaacctcttaaggctttatcttaccatgcattcaatagtttcactggacagaaactgatcttccctttgagactaggcacaccatatttacaaagtgacatatcaagagtatattgtttgcttttgataaaaactgcccctaaaacaggcatctgaggaaagaatcccttctataatttagtgttttgttcctttttggaactagtaaatatcaatagtagtaaggttaataatactagagtaacacctcatttatttgatattataaaaggatagataaaatattgctaataatttaatattgtagttaacatttagctttgaatatatgtgtttcagtgtacacacacacacacactctcagacggatttaatttttatggccctttttgaaaaattgatctagtggtgtattttttaaaaatgtgcatatccttttaacaagaatttcattttttcttccagaagaaatattggcaatatattcttgccgtaagccactggaaattactagtagtattcaaagcttttaaatttttaatttgcttgtgaagctttaaatttgagtgaaaaatttagtcttataaacaacttagaaaggttgctgcctgctctagatactatttgtgctaaattaatttagtatactaatcagaactctaatgaattctgtgaactgctaatgttagatcagtgaataaatggctgattttatttcccagaagagaatgtttggagatgaggttggggagaagttgaaaaaaaaaatcagaatgtggttgtgtaatcttttcctagttccctttcaagatgatctttcccaggtcattattcttactcctgaagatttttctttccctctcctcacctcccagccttccttctatttctttccttcccaccagtcctctgtccctccttttctagtgaaacattttatgttggtgctttatttttgctgttggaggaattattcctgggatggtgtctgtgagtaagaattctagagcattgattaatttcttactatgtatggttttgtttcattcaagcaatctaatggtctttccttgtagccattttattagattctgaagggccaaatcaaactgtttctgggcttggggccatattttatagcaagacttgtttgagttttcaatgaattggtgcttaagctaaagccgttaaagcctgcttccaagaaaacaaaactggcagcacagtttgttccatttcattttttttcagcatgcttgattttttaggggttggagttagctaggaccaactgggaaaagaatcccgtaagtgggagaaaggctgtggtgttgttagggagtgcacttcagcctaagtggtgattagcagcatttagcctctaaaaataactggtgagcagagtttgtagtcaggtccaatttcagttctagaggcccttacagtgcagggattggccagtctcaagctctggtaggcaagtgcatgcagtgtgcctaaaacctgccagcagtacttttgagtttttttttttgttttgttttactttagcatttattattcatggattgaagaaatcaaaatggctgaagataaaggtatatttttgttatttaggctaaaagtggctttagatctagctgacagcttttcactttattttcagtggtgctctgttaaaatatttttggctaagtgctttgactgtactgtctacattttctattttgaactcctggagatactgacttttcatagtagctgaatatttcattgaataatctgtctttaatccgaatatgttttagtgtcttaatttagatgaccttttagtatgttgtactactggaggctgcattttacaaatttcaaaaaatgtacaagctctcttcttattcttataagttaattacaatgaatttaaagaattatctatatttagattttatataaaattataggagatataaattcagtctcatattaatgaacagacttacctggttcaagcaaggacttaccatttatggaaagtgacctacttttatgtgaagcagacaataaatgcaaagaaaaaacacaagggttttattttgattttaaattgactctttaactttgaagtattctttaactatgtattgaatttaatgttttgtatatatttgcttttgctttactttgtaaattaagatagtctttccattaattgaaagactgcattcactcattatgttgaagatttataaaagaaaagaatagatgtatgaaaactgcttctaactctcagctgtctaatcagcaactgaaaggattctttgattaggatagagaatataagcatgtactatgtgaatattatttgaataattggtgagaatgggtcacttgactcgtctgataaagtgcttcatgtagccatgaagaagaatatgagatatgtatctgacttttagttcttttggaagacatttctctcctcttgtggattaggtaatccatgtagttaggaaaaatcagctgttgcatctgatgcacttttaacagtttttgattcccaaagggtgacattttatagcatggaaaaataatcagtttgatgagttgcttgacagtttttgtgtttttcaaaaaactttaaatgtgtagagtttatgtgtaaatatgaaattcccaacataatgctaactaaaacttataaatgatctataattcagttagtagtaggccagtgaagtagctggtgactgttcaagtgctggggttcatcttcttgtctccctttcctcaaccaaataaataaaactacacattgcccttcccccggcttttgttttggagagtcttcattttggactgttgcttgccrtagtaatttctgtgtttggtggtatgtgggaacattttctgatttggaggtcatgtacttttgatggaataacatgggaaaaaatgaatcgcatcgttcttgcagtattcttaaaccccagtaaaaatccgctttgactgatcccagaactacaggttgaacatgaagccagaaaatgaaatgaagacttagatttattctgatcttagaaaatagggacatctactagatgttcttcccaaatacctttggaacaagatactggtttcagatttgcttagggagttgtaaaccctcttaagggtttgtcttaccatgcgttcatcagtttcattggacagaaactgatctgccctttgggactaggcacagcatatttaccaaatgacatatcaagagtatattgtttgctgtcgataaaaactgcccctaaaaaaggtgtcttaaaaaagaatcccttccataacttagtattttgttcctttgtggaactagtaaatatcaacagtaataaggttaataatactagagtaacagctcatttatttgatattaaaaagggatatataaaatattgctgataatatattctagttaagaaacatttagcttttaaagtgataaatctctttactacaaactactttgaatgaaaatcttcctaagatttattatacatttcttctatgttttaatggcagaatcaatgtgaaaccagttactgtcttgtactgaagattatttgaaggactgtcagggattctgcctgaaagtttcatcataaatgacttcccaccactcagcttttctgacttcctgggcctgctcttgctgagagatctgtgcactcgataggcttttcctctgtcaccactctgttgctttgactcattgggttagattgtgtctgaaatgtagagttttgtgcatagagctagaaaacttaattgaagttgttagaatcacatctaaaataaaaatgtaaacaaattctaggtaaaggtgtattttttactgtgtttggctgtctccttcccatctgaatcccttgctgttttggtgcatgcattcattttttagaaaaaatattttgtctacttttcccttatatttagtgttacagtcaataacttaaatgagtatcactgagttaacttggataaatgataatttccttttcagaatctcagaaatttttctcctccatttccctttaagagagatagaaatggagaaatgattaaaatttgaattcaaactattactttgttttattagctatttcattatagactttttaattttttttttaagaaagggtcttgctttgttgcccaggctggagtataatggtgcaatcatagctcactgcagtataggcttattttaaataatatcatcttgggtatctgtttggccacatactcattataaaaacttaattattgggtaaaattatctgatattcatgtactgaataaaaatgttggatgaatgaaaagatgaactatatttgtttagccttgctgttttccagttaatgaggaaaaatacaagagactggtatcagctacagaatgttcaagaggacataagacaagaacccagttttactgaagttttagcattccttttgccaaaaaaaaattcaatttgattcttagaggcaataagtagcaaaggcaggaaattcttagtcattagctactataattccatatttagagtatgtggatattttggaaggtagtatttttgttaaacttagtgttgtacgcaaatggatttgtacgcatatgtctgtatgttatatagaaataagcgttcttttttggatacagtgttagaaaataagtctttctgtttataaaaatgtagtgaattagacatacaaaactgtttctgaatctgtggtgcttcctgacctcacagaagcttactcactttcgtaaatctttttttcttcaaattttagtagtggtttaatttgtatttttctttttatatgcttacaacacataaaaattttggaaaccaccatttccctctaccaacattgcagacattctcacccaatcttctcctgctatggctgtgtttcaggtaatgatacctatttgaagttgatttaatctgcaacaataggatctatgcccagcaagtatttttatttaatacataaattaygtttttatatagccagcttttatatagatcacattagaaacaaagttgatggccatttgtcatttggtaagcatactttatgaatttaccatattatttacaactctggttctgagggatccattaatatttaaagaatgtcagaaaaaggaattacttgacgttttaagaattacccagcactttgagaggctgaggtgggcagatcacttgaggtcaggagttcaagaccagcctggccaatatggtgaaaccctgtctctactaaaaatacaaaaattagccaggcgtggtggcaggtgcctgtaatcccagttactcaggaggctgaagcaggagaatcccttgaaccgagccgagatcatgctagtgcactacagcctgggtgacagagggagaccatgtctcaaaaaaaaaaaaaaatttatctacatgtaggcatgtagataaatatatgtatatgtttgagtgtacatatatatactcagatggatttagtttttatggccccttttgaaaaactgatctagtggtgtatttttaaaaaatgcatatatccttttaacacaaagaatttcattttttcttccagaagaatatattggcaatatattcttgacttgagccgctggaaattactaatagtattctgtaattagaactggacttagaagtcaaagggcaagttctagattagagctagtggggttttttgaaatcgtgtaatttggcccactgattagagattaaggaactcagagctgtagagatgagagtatgttcttagttctacccaacttgtactggtgactttgggagaatcatttcatgtttcacttataaaacagataattattcctgtccttcttcctgttggttctcacccaggaactgcccctgaagggaacatgtggaaatgtctggggatgttttttttgtcataagccttgacagctccttgcctttgagtccaggggaaaccagggatgccagaaatcttgcaatgtgaggaacaggtgcacaggatgaaacattgtcctgcataaacatccagaaatgccctctgtagaaatagtggcaggacaccgtgaggatcaccggcagcaaagcacatgaaagcactttgatggcgactctacctgccacacaaatgggagacaccgccctggccttccatcatctgtttgataaacttttcctcttctcagaaggcattttgggatattatttattctttttatttattaatattgatatatgtattatattcctttttatgggaaatttgaatattgtatatctttttaagggcagtgttgactattttctgttaatatcaaatcatttttgtttatttttggctgtaagaagaatatttacaaaagaatataaggtatattaagcatatcaaatgcgataaatgacactttaggtggacagcagtttacaaagctgtttcctgcagtgagaccaattgtgaatgagccttttcctgtttccttaggcctcaacggatcttgtaaaggagtaggaatggattgtgctgtttcacttttctgtccttttctctctggctaagaatatggaatggtttagggggagatattttcttctgtgtgttaacagagtttttaagattctgcagaaatgaaatgggacggagaaaaggatttggctacatttttatgtgatttcattaagttgtttatgtgctctgcctttggaaagaggtaatattcaggtcattttgatgagtaacttggatggaatatacatattatactaaatctttaaaaaaattcaggagtttatttcctgcactacttcaaagttagtgttgcatctaaacaatcttttctgttttcagaaatattttgtgtgacgtgttttgagaatttaactggaaactgtttttgaaatgatctatcattgtacataatcccaaattattggagaaataattgtgagaataagtgttcagtaaaatgttttcttcttatgatatcttacatttatttctaaacagagacaaagcatggaggacacaagaatgggaggaaaggcggactctcaggaacttcattcttcacgtggtttatggtgattgcattgctgggcgtctggacatctgtagctgtcgtttggtttgatcttgttgactatgaggaagttctaggtaagaattttgatatccttatgtgaatttgtaagagagtaagtgacatctcttaggagtcttgaatatttgttatcatctttctggtactggtaatttctatagcctttcagtggttctcaatagagtgaggctgaaaggggatatgaagaaggttaccttggagtattgtcttttgaactctttaaatgtgacctgtaggtttttgaaaaaaggctttatattgtatgtctgtcacacagggagaagttttatcaaacagtactcattctcactatatgcagtactttttgatttctattcaattttgttatattataaattttaaaaatacttgatcatgagccattacatttatttaaggacttgctaatggatcataaccacacaatatgcaaaactcttccttagagagggttttcaaagtacacccttctgtgtctctgttgggatgggatgagtacgtgtgcacacatataggtactggatgggtgtgctgagataggcgtttgtagatattattgtgtgtgtgtaggtgtgatctgtgtgctgttctgaggaagttgctgtggtccttctgatagtgtcctttctccacctttttccttttctgtaatcactgaagtttttcatgattttttacattaatgattctttgttatttttggagtcacattctccttcacttccccaaaaatctttttttaaactgaaataaaattcaatattatatatatttgaatrtgtacaattcagtttttttttactatattcatcattttatatacccatcagcattatctagttccagattatttttgttacccccttcccctaaatacccaaactcttcctctttccctctcctgggaaacactaatctactttctgtgtctgtgcttttgtttattctgggcatttcatgtaatggaaccatacattatatgatcttttgtatmtgcctttttgcacttagcataatgtttttaaagttcagtacttcattttatggctgcataatattccatcatatgggcacaccacattttggttatctgtttatcagtgatggacatttgggttgtttccactttttggctgttgtgaataatggtcctcctctttagtaatccagtgaaagatgtggacctgtcactggaaaaaatgcacacttgtgtctatgtacaatgttgcatgggtgatatccccttgcattggacttcctgtgcttctgctttacttgtcaaattatagacatatttttggggagaaagggcaaacaaatttttggctgtaggaataacaaaatatgcttatttgtaatctgtctttcattgaagtttttcattttcattactttaaagaaagtgtctctggatagattgacagaccaactgagggagaattttagtctggagacaaatttctgagtagatctatgctttgactgacttacagtgatatgttgttagggaatgtatcttaaaagaggacactttaagtatttgtacctttaagcacaaataacarttttcatgtttttacatgcatgcagccaaagcaaaggacttccgttataacttatcagaggtgcttcaaggtaggctattggagttgcatttcaagtctacgtgtgttactctctaatggctcatcctttttctactaatttaattattatctacatcagaatataagtgataggaccaatttcccattatgggtttgtcagaaagggtagtattttctatcttttactgtttcttgaattctgtactctgcatagccttgattagtactttttgttttcttagcagttgaaataacatccttatctcttctttcatcataatcattttaaatgtgtatgtgtttgctaagtcagacttctatatagcaagttaaccattttcctaggtagagcaagggctctggggagataaagattgatcagaactaatctgagccaaaatttctgcctgttcttctgtaattttttaatgtactttgtgttaaagaaatgataacaattgccaaaatttttttttagtactaatgctgtatttgagaaagctgtttaaaaaattgctgtacattaacattattatgtttctccacagtcattgtccaataatgaattagaatcatgtagattttaggatgcttttttagggagttgaatatatttgactttttgaaatgctaaacaaaataacagtgttccttatgataaagcactaaagcctaaaaacrttttctgttcatcaggaggaaaggttttggtagtattgtcttctcagcatatctgttttaagccctttttttcttagtatagattgcctgtgctgattaagttaagtagaataatcataagttttcctttataatttccgaagcctccagttttatatactttatttccagaatgatcttttatttttaaaggttaattcatgatatttctgttataagtcatcattgtaaartataaaattaatgattttttagtttttagtacttagattctatgttaatctatttacatttggtctttatttgaggcttggttgtttcttttggttcagatattgatagtgtgatgaaatttcatgctttagaaacattaaatttcaagtgacttaggaatgcatcaatattatttcatatatgctaaaaactttaccaagaatatttttagcagtataataaaaattattctgaactaattagatcaggatgttgttcaatctttaaagataatgctgtgtcagttttatttcatagmatttattagctgaacatttcctgactctcttaactgaattgctcgctatttttaggtaagatattcatttgacactgctttgcaggattaaaagagcaaagaattgtattaattggtaacatttatgactgagttgcatgacttcactaagttataataccttattaaatttcttttcttttttattcccatatccatcatttctgccctattataggaaaactaggaatctatgatgctgatggtgatggagattttgatgtggatgatgccaaagttttattaggcaagtacacattttatgttttttgttagtggtgataaaatgctggaaacaattatttttgctttaataatatctatctcaatagtatatatcttacaggagacttttctcccttaaatcatatatttcattactgttaaaattttaaatggcttatttttccacactctttcatgtcaatttacttttatcaatgaataagtgtatatctcttacacatatatcttttgataagtataataatttcatgtgtgtttccagatttaaagtacttcttattctgaacttagaatttgaatagataatatcctagtctgtttttagatatggtaattatagccatttttcattaacattacacattcacttccatttcaaaatgtaaatttctacaggcttacataaattaatgatgaaataaaagtgataataaacatcttaaaatgtcccatgcatattttaacggtagcattaaaatatgaactcctggtcttttgacccagtgtctttattttggaagtcttggacccttctctttcattatcagaattacttgtctttatcagagatgtttcttgtaataaataacaatgtggtattcccttatttgttttaaagtgctgtcttgctggaaagaatggtgttaatttcaatatgcaaattttatataatctggcctggtgagacttcctttgcttttgtatgtagcataatatatgttaaaactttttatataagagtctttagaaaaataatggatatggcatgatattatacactaagcttataaaataatgacccaaacaaattyttyttagttaacattgttttgtgtatatttattagatatgaaaacatggtaggatgccacatctgtaactagtgaaactgcttttagtagattaattccacctccttatgaaataaagttccaaatatgaaaatagagttttagttgtgattaaaggtaataaaccttcctaatgttgacctgtgttggtgttttttttttttttttttttwttattattgcccattgggaattagtgtttgtgcattgaaacttattatgaaatttcttttcttgtcttaactttaatgaaattttcaatgtagtcctgtcattgtgtatctatatttgagtttctctaaatatattaaatcctcagatgactataatcttaggcatgtaaaagaaacaaaattatgtagaacttatcagaatgatgttaatttgcttgcctataaatggtttattacttcattatattactttaaatgacacattctgaatagcaaagctttttattttaaagataaaataaaatgtgggccaagttccctcatttttagaaataatattactctcatctactgcattttattgatttttatttgtttgtttgtttttgcttaaaaccagctatgtggtctgtcaggaaatgccattagaaattaaaatgtggtatttctttgataaaacacactgatttctatagcaaactattaccttaacttgatttttagtgtatttgagatttcaaaaggtcatcccctttaagttttttaacctaccattaagaagctaattaattgtaactttgaatattgctgtttgcaggtatagtgtgaggaactcataaattgtgccatttataagaattatacacttggaggtggaactaaatttggtgaatatcaaggtttattttggtaactttactaataaatgcataaagacagatcagataaagctacataaatacttttttactcttcctgtactagtttgcagttggcttgtggcttcagtacagatgaaacaaaccaaaggtgaaatgttaggcttacttatcacctctaatcttatttcatagcatttgagttctctgcatgaaatgcaaccttaacttgaattgagttttatgactgaagttcttttctggtttgtgagattattgtagtttagtggtgcctctgttactggaaggttactgcaaagacagcctggtgaaattgttgggagtacagaggctttaatgggttctttgaggtcaggtagaggttatggggggagcactacagtgagcatatacccaaaatgaagccagacttccaaggtacgttctcactggagagggagcttaatggtaaagtttaaactttaagggtttaggttttagattaaggcccaggagatccaaggggaaggaggagggtaggaaatcagagataagaggagctgttgtcatcgcaggtatagtaataattaagatatgttaaactttcataggattttgcatttatttcatcagtttttttttctagattcttaaatctgcatatatctaaatcttataaatttggggaaatgtacacatttacatggtacatttcactcaattttagagtttggcttttcttgtgaaatagaattaaatatatgtgagtaaatcaagacccctaaccatcattaattttattatttggttatttctggccaaggcccttctgattctttgaaagygtgctaagcccatttttcttcatttacataccttcttatttttgtggccaaattaactaaaatataggtatcttttgttgtagttcagattattgaaaactaccttgtttgaaaatacattctttaaaaacttattttccaaataaaatcaacaggaaaatgacccaagaactaaatgatgcgaggactaaatccttagagtgacaccacctaaggatcatgtggttgtccttttgtcctatggctagcacctagctggcatcgtatcaggtatggstggaaagcaaaagggaagccagtcagcacttgctacatcctggaaaatcatttgtagactgatagatgcatgagtgagctgatgggaggagaagaccagatcttgccaagccaaaggcattccctttggttgagccctgttcttagaggttcagaaggaatcacatgccgagagtatatatttttctctctggactagtacttttgtcttgagaaccacaggaaggttgcttggctgggtaaacagttttgttcaaatgcttttgcatattcgttgcatatggtcatctgtcatactgaaggatggaaaagttttatatgtaatacttggaagtacttataatatattggcaaatggagaaaagtaaagatgtttatactaaatatgcagctatagtgttttaaggcaggaagaagaaactgttattcccatagggacttagttgggattatagatctttgttcacagcatttgtctgctgctaaattcagtgaaaacattctaggcttgtcaaaaagtaatttaaataccaactgcaatttgcgtttttcctaccaaaaacatgaacaatgacataatatagttcttttgagtaaagcagagaaaattcactataatctttaaaacttttaaattagttgtcgtcttatcctttatctgcctatcttgattgctggtagttatactacatggagacattgtgtgttgccaaagccttaaatgactgaattacgtggttccaaccagaaaagctcagtggtcatggatgttcacatttcttacagtcagaacaccccaccctgttattcctcctcaaaattaagggcttggtatacagcttggtagattctgatacctactagagctaagaaacctttgctacccagagccagttcttcacaggaaaaaaacaaatgatgaaaacaatatatactttgatttatttctatcctaaggcctgtttggggtccaatacttagttgtaaggggtcttagcaatagaagctaatttcacaggcccatggggagaggaatttggaatgttcctattgcaagtgaccagctaaggccttgatcacatttcatatcggtaggcaaagtgaattattattaatagctgactcttgtcattggccagaattacaggaccatgagtcagttgccagagttttatagagctaccacatttaatagtgttaaaatttaagtgttaaaattatctgagttacataatttgagtgtatttttgcccacctatggatgctataaatggtaatactgctaattatattaactccagaatttcctaagtcagctccaggtcttaagtggggtggtggtggggggaggggagaagtttgaggaaataaacctttctagtttgaatgaacaaatgaacgaatgtgtgtataatcaactctcgataaaatctggttggtaaatgagcaaatctggaggttgtcagagtatatatctttttttccctgatactgcttttactcactcttccttttactgtcaactgatttttccattactgtccattgatttttgatgataaaattttgtctttcaactcaacactctaatgagagaaaggtaaacctgggtaggggctggtaggagtggtgaggcttggtcaaattgtggctttcttttgacatttgattgagagttgattgtaaggtgtgcattttaatggacttctttattttccaaataccgtttctgtaaacctctctgaccttgatgcacctcgcttttgagatcacccttcctccacttcttttttccacctaactgctctccttattttctctctctcttcctttattcttatgtaggcctgaccaaagatggcagtaatgaaaatattgattctcttgaggaagtccttaatattttagcagaggaaagttcagattggttttatggtttcctctcatttctctatgatataatgactccttttgaaatgctagaagaagaagaagaagaaagcgaaaccgcagatggtgttgatggtacgtcacagaatgaaggggttcagggaaagacttgtgtcatattggatttacataaccagtaaccttgattcagggactgaagtcattggctaatgaacacctgaagcagcctcctttttcttttctttccttggcttatgcagggcttaatgtgcagtggggtggttgtgatcttaccgtgcaagtcaaccatgtgatcttgcccagtacagctactagctagtcccttgctcgctcagctcccccaacttctattgaagaaaatggtactcctcattcttgtagtcagctacaaagtacactgaaaatgatgttcttggtggtataattggtttctgtatcgttttgtttcaactcatgtattcactgaactaaatttggacacttaacagcaaattgtgttgtggttaacccttgatgcttgtctttctaacacactattaattatgatgattctaatggatttcattataaaaatatttctggcatgatttttaagttaaatgcttctctgttctttaacatgactgatgtataaaatgatggttctttactaagctgatattttttattgtaatttgtttaggtttgtcagataggttcatacaaatttctatgtaaaattctgtgttaatggtgcttttaaaataatttaaaaataactccatgtttttgccttagagtaagttaacttactgttttcagatagtagcatgacatatttctgtctgtgaaagcaaaatttattttaaattttatttccaaatatacatccagagaaagtaatttgtattttttttaaagtaggcatattacacaagagggaacatgtgaatatgtatcttaatgttgtacatattaaaattattcatcctaaataagtctttttccattttttccttcattaacttattaattggatattgattttggcttagatgtaatgtgatttttagaattataaacttattgaagtggtaattccatttagggcagtaaacttttcccattagaaagccttaaaaacatatttgaatcaattgctttaaaaatgagtttgcttcagtagtaaccaaaacaggtgtagcagctatatacaaaatgcatttcttaaaatgagatttcatcagtttcccctcaagcaaagctcttctagggataaggaagataaggaaagggatgttactttttgaaggagtgatgttccgtggttttaaatctcttccagcttctctaggattttgcttagtgttagtttgtcagagagctaaaaatttgaaaatgcttgcacttcctcacgttttatttaactataatttctacttttcaaatatttcttgtcttctatatctaatcaaattactttcaataagtgtatcattcatccatttattctgaggggactatgacaaatttaaattgttatgaattactcttgtaggctgtcataataacagcctgaaagtagcagcctcaagtcagcatgggacatccattccctctgcccaccatttacctgtgtcagcaaatactgtccaatttgctaatcttattaaaaagcaaacattctgtagctacttttggatgtggatatacacactggacaataatctcttaaagtttaaatgactattaaagtgactattaaagytcttgtttgtcttgccygcactaatgggcaaatatgttttattctgttaatgcagaagatagtctgttaaagcttctgtttccaaatattcaaggacttcagttaagctgtcacttagtagcatgttctgcaacaaatgagtatcattcagtaatgttccttctgaaaatttattcaatctttgtatttattgtgtcttctgctttcatacttgggtactatgaaatatcaaagtttattaggtttaaattctaaaggaatcttcagccccactcaatgaaattcacccagcctaatttccgggatatactttttaaaggaatcttatttgttaacgtgttgttactactaacactagaagatattcgattaattgataagaagtaaatgattaaattttgtgttaaaaatatttgaaattactaatttttcatcaggctttatttgccctactaatgcatattttatgtacagaaattaattatgctttatttttgtaagtgaaaaacaagaatgtgggataaaaatttgctacttattttgtaccacctctcattagttcctctgaaagcctctgatgaaggtgacacccaggtagctgacgaacccctgacttctgtgacttccgtcaacttgtgcctaaggcttgtgtgtgtgtgtgtgtgagagagataaaataaaggtattttattttatctctgcactataaactgcactataaagtatctcaaagctgatcaaaattacttcaccttagtttgatttattatgtattgctaaaattcttaattttctaagcgtgtattttctgactttgtttcataatataagtcttttcctacctcatgtcttttaaacttaagaactaaattaaggcaaaatcatatcccattaatttgaatgtttatatagttatggaattttaagttatactgtatttactttaccttttcagagttgagaaactctgtggaacaggcttcgtgttgagatatagtgttgtctcctcagagtcactgttctggcttattcggatgtgctgacatttgtccgattgcaaagacgctgggttctccggagtttggcacgaaaacaagacagcagcactctggggattcttttcagccctttagcttccttcagcctgccttgctttgggacatgagtggtgggtataagtcagtaggggaagtgtcttctgggtgccaattttacccagtcctgaggcctggctgtcagcctgctgccctggggatcctgcagacgcctcggtgctgaggacatatggaatagtgggctgtcctgcattttcatcttgtccttgattctttctttattctagaaattacctccctgtcttatagagctgtatccagacatgaaagagggactattttctgtttgaattatttttatttagttagatagaacagattgtctaccttgatgtttgtgactttggataattatcaaaaaattagatctagcacagccagttattcttaatttggtcacttgacagttaactttttgggaattgatgctccatgaccctttctaaataatccgctgggctagctccttaagtctataaaacatacaagaaattttctgtgatttggctgtggaatctttgatcacaatgcatatttggaatgcttaaagaaactcagtgacccagactttattttcataagttaaatgatggaaccagtattcagaattcactgcctttgttatttgttgagatgaccctgtaatacttaggagttagatattaagtagtttgtggactccttgaaactaggaaccagatcttcggttttatttgaattctccttcaatgctaagccttgcatgtgatattcattaatatcatatgaataatgtcatatgctggtgtgggtcctgaaggatgaggagttactccttgcataataaaatactgagttttttttttttaaaaaaaactggtttaaataagtggtaaaattattggacatattttttgcaatagaaatgacattttgagtttctataacaaacctaygctaacaaaagtcttcaggtgacctttccaatctccaatttgtatttgaatctgcattttacctttttttctctgtctctggatgtaatccctttctgcttatttagtctttcagttttcttatgttctgatcctccgttccccacttactgtagagggttggtgggtttgtagctttttcttcttctttttttaatctgtactatattattacatctatttaaaaataaaaaagcaattggtgtagtgtcctgacatgcattttactaagagtagacatccattctagaggaacagtctgtctcgctaacaggatggttactcagacatttagggcctctttttgctatttgtagtcaatgttgaaatgattacgatgttccagtatgggacggaggaagatgagaaggcttacagtgactcacaggtctcactagaaatggtgagagtggctgaagtgacctgagtatgaagtgatatccagaccaattctagagctgtctgaaagtctgaagtagctacttgtgtatctgtaatgcagccagtcttctaaaatcatgtctattgcatgtggtgtaaccacagatctatccattggcttaatggttcaaacattttaatttcatagagaacatttgattttgaaaatgtagaataatggcctgaggcagttgccaaaatagcataaatttcctttaggcaactctcttacgttctaagggaagaatgtaagatcttttttctaatttctgtataagaattcccaaatagttgccagagctattaactatcatcactttaaatacttacatcaaaataagtataaaaggacgaaaagaaaataaatagcatggcagttgtttttcagcatgtattttaagcacatcctaatgctgctttgattatttcttaaattggaatatattctattaattaaaaacaacttttgtctgaatggattaagaaataccaagatgtttccatttttgctcgaattgatagaattttcttcctactacttggaaactatttttgaagagcctttgtgttgtcatgaattttattgattagtggaatgttcccttttttcttttttttccctagacattagctatggtactaaagatagaaaaggagaaaagtagtgcatgcttgtggcattttggcactgtagggagaatctacatcaaccaaagttgcaaatgataagaatttaattctgtcaagaattaggaagaatagaaaggtgggcctttcgtacctgccttgtggttttcccttaagtccacttctctaatgcccgcaaactaatattttttcccctctacgtgctgtcactaatcttggattaccactgacccctttctccattactgtatttcccattgttgctgggaaaaaaaaatctgttataaagttacctgtactgagcctctgtcgggggcatgctgctccaacagtttcccttgttagcagtcattctaaacttttccacaaccttccttcttccagggtcattttattcctctgtagagatgattttgctttctgctttcctaagataatctagtgtggcttcattccattattttcttctctcttccctttacaacattactatctcaggatttttttgagctattgtttcttgtctcattcactcacctttttttttcagacactgcatcctctggtttccaaagctagccctttcccttgagcctgtacatcctcctgacctcatcacctctctcctgttatgaacttagcttctttttcttacagacatgcctgcgtttcctcgaccttcaaaacaaaacccggataaaattcttcaaactttttccttttctgttcccctcagaatctagggaaattccatgtatgatcagttttcttctaaggaaatgaggaaggctgatgtgagcaccctagatttttggtcacctttccttccacctatgttttctcatcactgtggcatgactgccttctctactgcttgtaaaactgtattctgaagaaccttagaggatatttagtaagtaacataataaaatagtgccctcatcctaaacctttgttcatgtcttccttcctaaaactgatcatttcactttaaaaaaaaaacaaacaaacacatttccttttttaaaaaatttaatttcattttattttaagttctgggatacaaaaaaaaatttttttttctttactctctttttgtttcattgttacttagggactcttgttaactgtttttggtggtatacttttttcatgtctatatacttttcttcagaaactgaatgtaataattgtttaaattattagcttggtcctttttatgtcaaaaatattgaaaaattattggctatgtttttaagttcagaaaagcataagatgatcctttggagttttatatcatgcattgcactttgttcatgtgttcatttctatcactataaggatttatacccaaaccaaaaaagtttaaaataaagcacagcactgtttatttttatatgtttcactaatctgatgctaatctaatattttggtttattcatgacaaaagttaactctagtcttttcatccatatagctctttttacctagatcataacagtgggggtagggagagggcagtctgggtttcctcactctacgttttaataggaaaatctggttctgctgtgggagaacatgtaggagtcaggaggggaacatagcggtactagaagtatattttaatgttttatgctaatgtgttttacaccttagatactactcatatttaaaagtgggtattatgagaatagttttgatattttattctgaaataaactttagtggagagtgattggaaatagcactcattattgctgggttatacactgtttttggcagaggttaggaaagaatcaagttttgtctgggaaaaataatttttaaacacatgggaataagtactggttatggttacctatgtatttcatataagtggacaaatataaccatggtcacgtttccatttttatgttgtcagtggtaagagatactaataacatttttgaagaatattgatatttcaaccaaaataaattaccattctcgaatggatgacctcaattgatagatacaaattgctatcaatagtgaaaggggaggtttgaacaatataatagaacagacatctaatactgaaagtagaagttttgagaaacgtacaaagtgggttttacaatttacagctgcaaaaatgtcagatggctttggggactttcttgtgaccacaccttagaccttcgttctttagtgacaggctaaaggccacccttcctgaggagatgaacactacattgcacctccaaccctaatgtgcctaagaaatggattggaactttacaaagtttgccaatacatagcataaaccagcctttatgtgactgagagagagaattgggaagatcagttcattgggatgctaagtacagcctggttggaataagagttagaggtatattgttagagactcaaaaataaatctattatcagaactttcatttgccaagagaggaaatagaaagctattgcaaagtttttagagtgggtgaaaaatgtaaaatgtatgtacataatactgtcattcttacttgcttgtataattttttaaaagacagtgcgaactggtggaagagcagtgattgttcaaacagtaaagatgaactctatcaaaatatgctatccttttttggatggcaagtgtgattgagtagtgaagtaaggtccttggtccttcactctagtatttttaattgatcatctgtgacccaagcggaagtctaccactgagtagaaaatgcaatttccagtggcaattaagtatttctaatgccaacaattcttaaagatctaagccaaattgtgaagttggttaaatcataggctgattataatgcatttatatgttaaagatagtgaaaggaaagctttaaagtgacaaataagagagatattggagtattttttaatgatgaatttaactaacttaacatattttatagtggcattgattttacctatttaatagacacttatttttgaattcccttaaattttctgtttataacctattttcatcttgtaaatgtcaacagaaggacccagtggggtagccaagagaaaaactaaggctaaaggtattttcattttttcaaattagccttgagtgaatcaagtttaatgtttgaaaatgcatgacattttctgggaatgttaatattgctactaatgctaaacactattgcttttgggtcttgcttgggtgcaacttaggttataagtagttttatcaagatttcatcaaaggattttctgcttcaagcctataattttaagtcattatcttttcatgttatcaaagctttgtaatagtctttaaattaagaatgtatatattatacaaatatgttatatttgttatgatgtatatattaaatttacatgtacacatcttaccttgttccctaaaacctttcttactttgatttttttgaattacttttgggaaaaaaagatgaagtcttcagtaattgtttttatttctccaaaagctctcatgacactctgtcttagagcacagtgaaagctagtgtgattcaaatgtgtagttttcagtaaaatgaaaacttggatgtaaatgtataaccctacattacattgacatagaatttactgtgtttgatattttaattcattaaaaattattgtccgggcacggtggctcacgcctgtaatcccagccctttgggaagctgaggcgggtggatcacgaggtcaggaattcgagactagcctgagcaatatggtgaaaccctgtctcaactgaaaatacaaaaattggctggacttggtggcaggcacctgtaatcccacctactcaggaggctgaggcagaagaatcgcttgaacccgggaggcagaggttgcagtgagctgagattgtgccattgcactccagcctgggcaacagagtgagactctcaaaataataataataataataaataagttattatacctgtcagccatttgtagactaacagctcagtattacagcctgactttatatgccagtggttattcttgttcatatgttagtagtcatattctttgtgggtagaggcatgggggatgtgcatgcctctatataagcctgtttttctttataagcctgtgatattcttgtggtcatttcacgggcttggcatattgtttgtagtttgtttttttggtgaaatatgaacagatgagacttactatgtgattcacagggttttgtgatttatattttaagatcaggaacttttaatggtttaacctcctatctcttctgaataatttctggggatgaaaacaattttcaccatcttatttttatataaataatgatgaaacaaatggacaataaaatattttacttcttgatctagagaagcaaattaaacattaaagactgaattttttaaaagcagttttcagaataagacatgatagcattgcacatccattttacacttttgcaatgccagtatctatgttactgtccaaacgcattgaagtagaatgaagactcagcatgatcctgaatgaatactattctgtattcttaaaagactgtaataaggttttttaggaagaactgaagaatctcctggttgatcaccaggaaattcagttaatggagaaaccctatgtggtgtttttgtttgttaatcaagattttattagacagcctagaaagacatagtgcttttagtgagcactgcaaatctaatgctcattttgaataccatttgtgctatgtaagttttatgtgattttgatgggcaaaaacatctttcacattttattatattaaagaaatatttcattttctttgtttctgcttaaatgtggcattgcttctgcttaaatgtggcattgcaaacaccttaccttatgatttccttatgagagtacaaacagatgaaattcagagcttttgctaactgctttattaccatgtaaagcaagttgaaagcaataccttccatgagatttggaattagctgtgtgtttcatttaattgctctctcaacccaatgaactagaagacgtgtgttagcttgagttgctctacatgaattaacagggaaacatacttaaaggaatactgatttcatgatgaatataagcagaaagagaattctaatttttccttttaaatactacagataatgatttaaaaatgtcatacacatgacaattttttcctagttaactaataaaatgaaattatatttaattttatttacatatatttgtcttcaaagaagcacgtgtattttaaggacatatgtttttgagctaaacattttaaattatctttgtatatattcttacaaattatgaaaaatttgttcttacgttgccagtgttcctttaattatagttacaaagtgtgagttaatactttgtgtaaagcactgccttcgtggtgccctcaattttataatattgcatgttaatgttttaagacaagtcatactatatttcaagatggaaaatatgacaagcttctagcattttttaatagttgatatttgatagagatttgcacctatttttagccaccataaagactagtgaattaaagtaactttctgaatgtgcatttcctgtgtgtggagagataaaaagagaataccttttcactaacttcctgttctgtgattaagagatcctgtcaataaacattttttcctttaattggaaaatctgaaagttaaagaactcactaaagaagagctcaagaaggagaaagagaaacctgagtcaaggaaggaaagtaagaatgaagagagaaaaaaggggaagaaagaggatgtccgaaaggataagaaaattgctgatgcagacctatccaggaaggagtctcctaagggtaaaaaggacagagaaaaagagaaagtggacctagaaaaaagtgctaaaaccaaggaaaataggaaaaaatcaacaaatatgaaggatgtttctagtaaaatggcatcccgagacaaagatgacagaaaggaaagtagaagttctaccagatatgcacacttaacaaagggaaatacccagaaaagaaacggctaaagctctggcatcatcatcccagaacatggtcatgttccagattgcagtttgttacaaaaaagcatggaaaatgtaatattgctctgattggtgagggtgtgtaaattagccattgaatgtatcattggtgcttagcaagtaaattacctgaaatttaaatataccgtctcatacttctaaatgtaaaaacattttaaaaatgtcatagaatatgatgtaataacttctatttattgatcatgtattcagataaatgtatatgtatcatgaatttttatggattaatatattgaatactttcattgacgttaaataagaatattaagattttaaatgttatttctgtgcataatgccttgtaactttttcaagtatgctaaatactcagggagatggatttgctcgttgttttcttccctccttccccttcctgcttccctgtttttctctttcgtggacacctccccaggctcatgtgccaccaccttccctcctctccagccctcccagccctcccgcagcctttcagggggccgttcctcaggcttttcatgggttctccttccccttttccctcttatctccccttttctagtctccctccccaagtcttttactctctcctttccttcactcctcacctcaccgctgcccctcactcctgcatgcttctcactcctgacctccctacaacaacctcacccttctcccatcatccagtacatacttagtgcttaccatgtgccacatacactgctccgagaactgtggccatagccatgaataaaggggagaattgtatttagaagaacagtttcagaacacttttatttrtgatacctttatagtcttagaataactatagaaaggttttaattatttcagattagaatgtactttcattttatatcacactttttttccattattttggttgaatggcatacatttttcatatttgattgtgtcattattatttaccatttctaaggaattgcaaatgtaatctcttcactagagatcagaatttagcaccttagaaaacatttaatataaaagtgaagttttagtgagaaattaattctacaaatggtttgtactattctgtgcctcaaatattaaatatctaattgtgactactgtgaaatgcagttagttgataatgataaaatctctgtggtagcatttttgattctcttaatgttaaccttattaacaacagaatcaaaaatgctaccactaagattttattttttaaaacatatttatttacttttttatgaagatcttaaaaacgagatttttgatctaattaaagatatttcaactcagaaatgagtatgtttaagtgtaaatatttctaaatgtattgtacacctttttcttaggttaacgccttttactatttaaagtcaaatactttacgacatttagttgacagaaacttcaactcaatagaattatacaacagagaagaaatcctagagaatatctaatatctccaatataatcctgttattttattgcttaaaaattaaggcctgaagatattgtaacctgataacttsgagttttatgttttgattagtcaggattttgccatttttacacattacaagaacattgtaaaccaaaaagggaattctacagctgctttgtttggcagatacagggcactaacttcagatgactagatcccaagtctagacctggaatcagagttctttttcctcttagctcacttcctaagtcttaactgtgctggtttctgcctgagttattctatttggagatgctaccacttgataaccaagatggccctcagcaggctccagaccagtctctagtttaccaatcccaatgcagatggctctgggagagataattccagttggcctggttaggcctggtgaacatctgggaccatttttgtagttgaggatggtgattcttcccaggcgcacacctgtgcacaaagctttggaatgggagttgagtgggtcccactcaaacttcatcaaatgtagggcttctgggacaagaaagtgaggctttgaaaactggacagaagaagaagcagaacatgtcccccaggcatatgaaagttacacgattctcaaaccatatccccgtgttagatcttttctcctgagataaatggaatgtttttttaaaacttatgtacaaaattttaagtgctgtcttcactaaagattttttgttctctcttgaagaagggcaaacaattataagtgaatttgttgagagcattctggtaatttttaccttagtttttaagttcaatggctatgtggcagaaaatacataaatactaaattctaaacaaatgagtgaaaatattttggaataacctaatcatcaaaagcacataagaattgtctattgctatttagtaaagtactttgaaatgttttggctatctcattgatttttcctttgactgttagctcaagaattgaaacacctcaactaaaacatttaaagatcctttaaaagcacttgtagactagaacttgatttattttttcccatctctcttcttttcmccttctcttttctttctttttgtaaatgtttcaactaacttttattgaagttgaagtcacactttatccaactgcgtaatatttaagcttcaactaaaaacaagctttcagtcatgattagagggttaaaatcatgcattgcactctcagttttacactttttattcagtaggttgttatttctgtattgtttgcttcatattgttttctaagtataattaaaaccagaaaggttacctttttaaataagccagctacaacgggacaaaaaattcacaatactaggtagttgggagtcagaagctgttttcgggaagacctgaaaagggaaaattaagtactaaaaatgtaagtttattttgccatacccctaacaacattttatttaaattatattgtgacttgattacaaatcttttaaatgacattattggcatatttttcttaaactttgtaagaaaaagataacatttcacattttagtagcaaaatcattgttaagagatagtcaattttgtgaaaatatttgagtgctaatcaatttttccaggatgatcttctatcctttaatatttagatacttccttttgaagcacttacatcatcatcaaatttttggtcatttgttgtgtcatctaatttctgtttcattttctaatggcttcgtatgtgaatgaattttagttattcctaacgtcattggtagccactcttttgaattttttttttaaacaagtctttcaattttattttataggtaatttgcattgtatatagatgatcgtctcaaaatttcacaatgagagactgatgaaattgacataaatcaatcagcatgaacacttgaattaatccagaggactacttaagttaattctgtaggtggttgctttattgagaatattttgtattatgacctgcttagctatgcaagtttgtaacttcagaggtcctcataatgatacttggataataaagattccccatagacacttccattgaaaaagaaaagaagtaaacaagtgtcatttgtaatttgaaatgttttaagttaactgtcatgttactgtccatgaaatggatctggtgacttaggctctatctcctgacattgatttctttctcctgtgtcctcaattatttcttctcctgttaatgcccactggtaataattctcaaaatcgattgctcagaatattccattgtaaaatgcaccttggaaatggttgttttcctcatttgtaaattgaagacaatgcctattcctcaaggtggttgtgagaaccagtcaatgttgcatatgtgtaaacagccagcacatggttgggcattcagtttccctttatcattggtagaataagaatagtaatactcaaccaaaacgtctcagtcaggggttaaaaacttggaagcactgaaactgtgcttcctattcctacttaggtcaacagattgcaaaacaaatatttcagtcctttatcctttgtaatgaatgtgtctttgtgaaatgagtatagtggagcctgatttattctattgagatcattgagggggcaaatgcaaataattataaatgttgcacatgagtgaagccgtaagaatgcttaatttttaaaagaatattgtgacaacctgaaaacacaagatatgaaggctagaaaaaaagttatgaaataaactatagccttaagtatatggtacaatcgagaagcctaataaccagcctaattgtgaaaaacttatgtttgttttgtattcagaacacatttttccatagatgagattttatggtcttcagagattttttttttactctggtccacaaaaattgatttaattctaatatccatttctgcaactctcattgtaactatgtttctatggaaaatgcatttatcattctgccttgggatattaggaatatatttagttttacttctgaatgttctccagaatttctttggttacatccatggtgttaaatccattcagataccttacatggacaaaaatcatggattggctcacataattgtaaagcccaggagtagttttggcttttttcttttgttatgctggatctaggtgcttgaacagtgttctcaacatccatctgtctatggaccctcaggaatgttggctttcttctcgggcagagtctcgtgtgctcatcttcaaccctactccttatggggtgggagataagaaagctgtgattggtgacaccctgggatatgtgagtgcccacttttaaactgttgggtaaagaaaaattggagtcctctaaggaagttagtgtgtttttaccagaaggaggaggaattggtgcactgaaagcaggcagatgatggagtttgtttcccctttttctacccatcccattcctacttctccccctgcccaaatacagagaggtgaatgggatgggccaaaataggtatttcaaaataagaagctgtggagctaaacattgggtactcatgggcataaagatggaaacaggagacactagaacttctagagaggggagagagggagggagacaagggttgaaaaactaactattggatactatgctcattacctgagtgatggaatcattcatattctaaatttcaatatcacgcaatatacccatgcagcaaacttgcacgtgctccttgaatctaaatagaagttgaagttatatttaaaaattaaaaaaaaaaaagctagggagaagagagagatctcattccaaacaattattggtcaacaatagttttagaccattgaaagaatataagagaatgttgacttgataataaatattgccatttagatgtcaggtgataaagtttattttgttgttaagctctctccattttgccccattcagtttaaaaggaaagtttttgtgtttaggaaactaaaggatgggtgatatgtagcagacccataaggttattttcatgaaaaacctagcttgggctaatctgaaagattcctcaataacagtctttggtgtcttatcctttcttctccatttgcctaagaatataattgtataagctggatgtttattccttggctatcgtttttacctaggaatcaatttctgcaagagctctgtaagccttacaaagcagaaagtcatccatttcttttttctttgttctcatttagtgcctcatttgatttcactttgtstatctatttattgctccatgttaagtcaggtatgcatacatcatagaagtctgcctctcatttccatcttctttgccttatgtatcacttctcttgtgtcctattagagggagatgatctatgcttaaagctgttgggttatttttgataattatataacaccaacatgctgtgtctrtagttcccatttattgattcaactaatatttctgagtatctacagcatgccgggactgggcaaggcatgggggatacaagagattgaggtggctgcaatccctccagtgaaatgctgcaaaataagcaaggggctgagagagaaagtaatgagactgaaacgattgtcagtacagcccactagtccctctgcctagaacgtgctcctgaatgtgctcctgctctgtgtggtgggctgcctttgtctctcccacgggacccagcccagtcatcacctctgcactcagacatctctgaccctcccaagtggctgcatcccacacactccagttatcgcactcatcaccttgcctcattcttggactttgctgccagactacgatttatctcgagcacctatcctagtaactgacactaataggcattcattgtttgtttattgaatggtgactatacaaaataaattatctaaaaatatttcaggtgtatatatactgttgaagaatattaggaagaagaaaaccgtgtgtgtgtgtttttgaagaacccaaaagattgttcagtaattgcagtgttttaactaccttggaagttacctgtgactggcagggaggggggtgtaaagattttttttagaagaaattaatgaaatggtaaatttttggaaaaatacttatttaaattatctcatttaattcttaaagcccttcttaggggtcctgttttgtcccctttttgcatttgtggaaaccaaaaagtgtagctgtggttaacactgagatagaattcaaatggaattcaaaggcatcctcttgtcccaggtgcctgaacttacacaccatgctgagttgcatgtccttgaactgtatttttcatgatgttaaagtgagtccactctcaccagtctttgttgagtcccttcattggtgctgaaaccaggctcttgggaaccttattggcagtgtttaattcttttgtaatttatgtctgtttgaaatctgtctgtccagcttgggttacttgaagatgctttgaatctggaatggctcttactgcatatcatggggcagctttgagtacctggtagtctcagaattttggtaagttccgagactgctgttggtatactgaggaagatctgtattcactgattacacaagccaggagcgacaacgaggattaacgtggttacctagtatgcatgcctttctggtgtattgattttccagaatatttctcaaatttcatatacctatgagccttattcttgggataaattgatttatactgctagactccttgcaattgaaacagtaccacttctgagcactcaccctgagcacagataaccatagctggagtaacctggattagtaaggacacgttttctttcatctgtacacctttgaattagtaaaccaaagattaaaacactaattttaaaaaactttttagctttttaatgggctaggtgtatgaaattgtatgaaacaaagtaagtttataattgtttcccaggttttgttgagggagtggcttgcttataactcttaggagaagtaaatcctttgtgttccctcaagtcacagcccttggatccagcatccagggcctttctgatatgcacacctctcttggtgcctcagtcacctttcttttccttggtgccaaatatgtgcccagttgaggaatttcgtacagtcacatgcctcatgctatcattttggttaaggatggactgcatgtatgatagtggtcccataagatcatagtgtcatatttatactgtaccttttctgtgtttagatacacaaacactttgtgttacaattgtctacagtattcggtacagtacgtgctgtacagttttgtagcctgggaacaataggatgttgcatacagtctaggtttgtggcaggctataccttctaagtttgcctgggcacactgcaatgttcccacagtggtaaaatttcctaatggcacatttcaacatgtatttccacacattcctcagaatgtatcgctgttgttaagcaacacatgactgaacttgcagttccctacccgaaacacacgtgtaacttacatagccacatccctgatttccttcagggtctgttcacatgttatcagtgagtccttttgccaaagtattatgaatagtccccacccccacttttccctaatgtgctccctgttctgtgtcttcccygtactatctgtccccatccaatatactctaaatagttcatgtttcttattttttaagtttctctctcccccggaaggtaggtgtgttgttttcatttactgtagaataatgccttgaattaataggtgctaaatatttgttgaacgattaaatacaacatacaatttagtaagtttacaactactgcatatttatggaaagaaatatattgattctttctcattatgggcagcagtgaataaagtaagctaatcctgggcttgggtatttgtgtcactcatatttgctatgagtggttgatttaaagtgctgatttcatttgcatttcatagcttcatctaattttaattaaaattggaggggcaattatatagtgattaaatgcaaatgttttataatttccaaatttatctgattaacctaaagaactaaaaccaaggtatgttttaagggaattaatgtgttttccaaatcatgttgtggccattgctgtggactggcagtatctattcaccatacataatgactggaaggcggctgtggacaccctgttcctcttggcagcacaggaatggaagtgggtcccagtcctgatgattaacactgaaaagggagactgctggtagcttctggaaaaaatttcctcaagcctaagaaagaagcagagcaagagatgctccttttgcttctggacatcgccttgtctgaaaaagaagcttgcagctggggagctctgattgccagcctgagggtgaagcttgacctgcgatgcagtcagccgcctccgcacttcttgtttagttagatgataaatttccttcctacccaaccattataagctggcagtttggtaactgcagccccaggaacatygaaaccgacacatctcatgtcataacctaattttgaatatttatttcattgctacttcattgccacttgtacctcataataaatccatttttgaaaacctttcctatgactgaattgagcttatatgcatttacttttcttgattcattttcgcttgctttttccctcaaattttagaactaaaatgagcttgggtggcaaaaagttttttggaaacactgaaataaaatcttgtacggcaaattcttccatatgggttgttaaagcaattatagtctagaatgtgtttttgttaagtttcaaaaagtttatagaggtctagaggaggagatacagtaatatgatctcagcttctttgaagtttacaatttttttttgtactgatttcatatctggaaatagctatgaccaggtattaacaattttataatacaccttccactttggacagggtaaaataatcaatatttttygctctgtgcttttgctttctcctgtttttcctatgttttgcaatttcaattttagagacaaataagttcaagttggttagagaaagctgactctcaggggcattgtatgtcggaatgttggtatactagtagtatttgaacacgtagcattatgacttttcaaatgaaacttcaaaactcattaagaatggggttttcaggcagtttagatctttatcgtttggtgagaaaacatttcattgcttgtataacacacggaacacagtttgagagcctgctaaagtggggtcagtgaaggatgaccctgtaatttttcattcasacagatagttttgagagtgaaataatctcaggacagcagacataaactgggagtgtctcaggcaaactagacttatgacactgaaatggtggatgctggagcagaaatacggatctctggtacataggagtagagaagtactaatgtgagtccccttccctcttctactcagctactggagtgcacctaagaagccctggccctgcagggaatctccacagccatttagacttagcagagtagtcacaccactgggtgtattcagcccttcaacaagtgttcattgagcaattgctatgtgccaagtgttagctgaggtgctgagagtgcaaagataaattacttgattcttgagattcttaagctttttcccattcattcagcagaacttggcaatgaatcattccatacctgttccattaacagttgagggatgtaaaaatgattatttaaatggtaaaagggagggcagccctaaatttgaatttgaaatgtgatgtcttttactaggccttcatctctacccyctcctccctgaacytgaactacaattaggacctgtgtataatccctttgcagcctgtcttacagttagaggtaacttaggtatagaacacaactgtatgtgttggtgtcaggtgtactagtggtgagttttgtgtggaaatagtgttgcaaatggtaactagaggaaatgtaagtgatgtggcagggtcctgtgtatctgtctctgtttcttttaagatttgggaagaggaatgtgggagtatgtttttgtccataaaagaaacatgaagagacataggaaaaataataaaaaagaagagtaatacatcgaaatgaaaattttccagaccacattagtgtgcatacatgagctgcacagagctgcttaarattagaatactgcccttcacatcaccttgaccttcctgccgcaggctgtccatgcacagtgactactcttggtaggagattcttaatgaggtcaggaggagtccaggatcagcaaacggaatctttgaactcttgaatttagctgttttctaaatacttggatttaattgaggacctattttaatgttccacatacaaaatatcaaataacttcaaataactaagttaatataatagattttagactggccttgactttaaaatcagtttcatgttaacataccctgctgtcttattaggacttgtaaaagggagaagaacttttaaattttcatatgttttagctgttatagaataatatgattacttgtaggggtttcctttagatgataataaatagttatgtatgatttctttttctttttaactgtttttcaagtagaataaataattatataagtgaaaacatcgagtgtacctgaataacagaaaattcaagtgcattttagttgcctcattgctgaattcaaactgcaggacttaggaattaatcgcttatgaaaacaaaaggagcttgaactcatattgaacttttggcaggtttagacatgactgttttagagattcatgaacatttaaacaatgattttgttttaatttgaagtgaaaagctaactaagacaaagagatatattcaaggctcatgtgaagttgaagagcaaactgttttcctacctcactttttaagcatacaattttagaaactattaattagcagcactattaattaaatgtttgaaaatattatttttcctggtttaatgtgacagaaaaccccacaaaaactcaagttaactttgtgaataaaaaaatgcaggacttaaagagagatctacttcagagccagcagtcccgccagaagaggctgagccacacactgagcccgaggagcaggttcctgtggaggcaggtaagcttgtcctcatcctcgagtctcgcccaggtgtgccagagcctgacaggtatccgcatttacagaatcacgttttacctggaatttgtttcacatcatttacagaataattaactactttttttctcttctgaaattatgtagtatttttctagtagaaattggaacaggataattttaatttttaagatcagctctaaggcagacagttgttctttgtccaaaaycacacatttaggaacgtcatgaactgaatgttgtttcttgattccaattccagcactactgtactatattaccttgaaagtaaaaatacacacaattctacactactagtgttatcatttgtcacgtgatttaatagagtagatctagtggtttctcagtcttttttacatgagggtctcgtttattttaaaagacttcccaaacctccctgtgggcatctatggagmctgttttgtgtccacatgggttcataaatcaagcatctctgtagttaccccaaagcctatgactataggtaggaaagtcgtgaaatattttaataagttagtaaatctaatacagtctctaaatctctggttttcttatgccacctattgaaagtttaaggaatgacactacatatttactgaaaacttaagtactgaatccaaatggtactttggctgattttttcactgtgtgctgaggaataatatttgattttttttcctttaaggccaatatgttgctctgagttttgttatttgttgaatttttaatcctaggacaatgtattctctctcattcctgtagaattgctatgatcataccatagctccagaatagatagtaacttttaaaaagttttataatttaatgtgtgtttggatttagcacctcaaattttactttgtactaaaataaaacccctcttgacccccacatttcttttttctgccatctaatccctctcccctctacaacagccacgattttgaaagaagaatccactattacttttttaccttatttttcattcattttttttaacccattacactccagcttctgcatcttccaatcccctccagaggagagaaggagtatttgcaaaattatggaaagttgaaatggcatggagtcctcactaagttcaaagccagtgctggtagcagatgattctggagaagtgtgtgaggactcagttgtggaggtattatattctgctcctaggaactgagactttcaccagtttgggcaaagatagccattaaagagtgagcagagtgcaccaccctccacttctagtaactcagattatattctctttggatggtgatttcagcagttatgaacctgggaatccagttaggaagctatcttaggctttgtgagagaggatggcgattggcagactctataatagcacaagactacatatataaatggcttgtgaaatataaacatttattaaaaataggcatttttatgctttggaaatgattttgtagtgtgattagcatagtagatattacatttaaactcttttccttcctgaagtctaaattaactttctattttttgtcatggaagattagctctttgacaacaaccgatgtcactggcattatctcacatgacagcatttatgataccaagtgtagtgctacttctattcactgaacatagattatatttattagagaacttagtatcaatgtagttatagcttcttgttcattgtgtgatgttgcagttaagtctaataatctgawaagcaccacagtgtttttggaatgtcatcatttatgttcacttttgtaattcaatttatttgaatttatggatctcagtgtcagatgtggttctccaaagctgaaaggattgtcagttacaatgtaaggttttctactgacacttcctgacaaacctgagtgagagcagtcggctacctctgagtattcagtcctctcacctgcaggagtgccctttctcctctcagggaagataggtaatggttgaccagatacttcaatctgtattgaccttgtcttccacatttctgtctttatttccaactatttccctttatgaaagctttgttcttcccactttattttatcattattgcgaattttattaattagaaacaagtcattttgcttttaataaggctcttttttaaatacaaatctgagcctgagttttctttaaaaatcttattgaaagtattttaatgcttaagtctgttgacagaataaaacaaattttacatatctaccatgtttgccaacacagaacaaaaaaatgtaagctgatagagaaggcatgcagagttgcttagtcaaatatattcattttaatgtgtatgyaccaatgtcatatttgagtgttaggggtccatgttgatgtttgagmttttctacttagctatgttttgcaattattttagaaccccagaatatcgaagatgaagcaaaagaacaaattcagtcccttctccatgaaatggtacacgcagaacatggtatgaattaaaatctgctctttgttttgagttactaaaataacgcttagttatgtaaaatgacttggacatttgttttaaaatttaaaggttaattgggtgtttgtgttttttaaaaagtttttgaattcaaagttagatagcaggtgttgtttttgaaatagcactaaacttactttattctacttcaccgtggaggaactcactgcatacatctaagagagaactggtgggaataaatgagaatgaacagattgaaaacagtgatccatcaggaacagaaggggaggatggagaggaggaaagtgggacacaggcccacggtcgggttcatccaggtgttgtgctccacctcgattttgcttcatggttggctggtcaccacaacaaaaatgatgacacttttaattacataggttgcactaagcagacaggaaaaaaaacgtgagaatgcaaaacattttcccagtacttaaatttaaaaatttttcatggggagctctgtgtagaggatactaagtaataacccaggaactaacgttttaaggttttataaggctgcttcttgaagcatcccttgataaaaacagagatcgtgatcccaaaacgtatctcatgaagggattgtggagtgggcaggatgttctggaatcctgattctcctgatgctttggtgtgatccaagggtggcctaaaggaaaataaaattacgtttcttaaaaacaaacaatgccctrtagtttaaactgttttttgccagtggatgctaggggtgtaggagcctgtatgcctttatttctagcttctttgcagctcggaaagccactcatgggcctatatgagcaagtgcargcttccccttcctcaagccttccttccccacggcaccccaactttaacttaacagaaggaaaatccaatctaaataaataagtgatttaaatataatggggtaagtgctgtcatggtaataaaataygggaagctcttcaggtcttactcagaaggggggtcagaagaggctggtgtagaccttcaccaggccagtgctggtggtgagtgttttaagcagaaggcatatcccagagacaggaaaggacctgaaagtagttcagaatggctggcacgtggaatatgtaggtggagagtcatgagaaaaaggatattttttacttgattctaagagtaactgaagccattggggaaggtatttaggagtgttgtgccttctgtctgtagcatgaaaaatgcatggggggatgcaagagtgcagctgggagattagatggaggttgtgcaggtaacagtgattcaggatggtagcaaacttgcctcagccaaaggaggggatggagagaaatagaaagaaccctaagatgtttaggtggtggggggtgggcaggcagccaaaagagggaagtagtcaagtctagcaccgtgttctggccacagcctccttcttggacttgttcttttctttaatcacatttagaaaatcacatttatggcccatggttataaatattctttgtatgttgataacttttaaatatatagctgcagccctcattgctcatctaaactccaggtttacctaactgcatacttggcatctccatttggatgtcttatgggtgtttcagacttaaagaactcatgattcttcccacaccccatagctcctcctcaccccagttctccccagattgcttatgctagtcttttatattttagttaatggtcctcctaccctcttacttgcttaacttgaaaactcgagagttttctttgatttttcttctcccctcacatctaatccatcagcaaatcctgtcagcattgccccagcactgattttggctctctagggcctcggtgtgaccgtggcttcttgccatgactgttgcagtagcacagtagcatccagctgggtctccctgtttccatacttgctcctctataacctgtgcttaatgtggcccagccagttgtgccttgtctgatcccagcctctttttccccttcagtgacttttctctagcccagctgacctctcttttccttgtaattgccaagcctatcactgctttggcacccctgcacctggtatatcttttgctgagatgtgtttcccaccccgcccaatcacatctttcagactgagcataacctccctgcccccatcatggtgcattcacaactggattcaggtcctgtatctgccattgattagccatgtggctttagcacagtttttcaagttcttcatctttcaaagtaggataccagtacctgcttcacagggaggatataacagctgcagagggcttggccatgcctagagtctcatgaccccttaggaaatttttcatgatgagactcaaagatagtgttcaatgttagactggtttcgctacagaaaacaggaatacttccactgaacaaccgcatacgaaagctaaatcctgctagtgtaaaaatcatcagatttcactggatagaatgaaagaagaataaggaaagaggaatatgataaaaataaaaagagaagtaaaatttgtagcagaaattcaaattggtgatttgctgaatagcagaaaatctaaaatgaggaaaaacagtattgcaagctatgaggagaagatagaaaacaaatagcatcaacataaataggcctgcctgattctctaacacctgagagcattgccttgccacgctaaagggagagtaactaaggaaggcttcttgcagtctgggctggggttgtggggtagggggattcagtagcagtacaaatgacaatgttgttattactgtaataatgrtgataatgacacctaaatacttagggccaggcatttttctaagtgttttaatcttcataacaatgttacaaatagatattattcccattttatgggagggaaatctgtggcacagggtagttaagtaatttgcccacagtcacccagctggtatggaagakcctgaatctacagccatgcatccggaccccatactygtcccaatccctgagctgcactgcaaagccaagtcctgcccattcactttctttagagtattatacacaggagatactctgctggaagccaggtcaagttacattgggatgcaatacccagtcttaaccatgttgcagtggaatcatgtaacatgtccaacctctacacaaaagaagcagagcagttcaatatatcatagaagttaatcacagaagagaaagtgggcatctttgcataacttgaagcctaataggaacatttgaatgcatagtatgattcaggtaaacctgtgacctagcatataatttatttttatttatttttaatttaatttaatttatttatttatttattttgagacagagtctcactgtgtcacccaggctggagtgcagtggcaccatcttggctaactgcaacttctgccccccaggttcaagcgattctcctgcctcagcctcccaagtagctgggactacaggcacgtgccaccatgcatgactaatttttgtatttttagtagagatggggttttaccatgttggccaggctggtcttgaactcctgacctcaagtgatctgcctgcctcagcctcccaaagtgctgggattataggcgtgagctgccatgcctggccctagcatataatttagataggtggctagtcactctttgctatagaatatttgaatagtcatttaaagttgttacctggaattctatgtcaattcccaggaaaaggccatagagtagccttttctttgacctgaggataattgaagaggcaaatatattagtaataattatgaattcatttattcattcatcaaatatttattgagtgcttcctttagctagacatggccctaggtgactgggaatatataatggataaaatatataagcttcctgtcctgatgtgtaacatcctaatgagaggaaacctgtcccccaccacatatacttaggcagattagcacttggccagaggaagaaaatagctgtggagtggacaatggtgtcttcagcggccgaaaggaggggcaggggaagccccagcagcaggagcaggtgtgtggcagcccttcacaaggggctttcatgtctcagttgtatgttgccagtgtcactttgttcattgtcatagttgagggagaagacttgcaacaagaagatggacccacargagaaccacaacaagaggatgatgagtttcttatggcgactgatgtagatgatagatttgagaccctggaacctgaagtatctcatgaaggtagaacacttttttttcaagttttaggataaaatataatcaatgacttctaattactgaagtttttcttaaacccctttaaaactgatatttaacttttgcttagatttttaaaagttgaagcttaaagcttcaattaaagcaaattttttcttaaaatagataccttgattttrgttcaaagcacttttcagggaaactcagaatatacaaatttcttataaatagtgagtcaaatacttgaggaaactagttttactatattcttctgcttagggtgctatttgttaaataaaattcaaacaactgatgaaatattggacttgataatctatcacaggctcatgttcacacatgaactctgtaattacagtgagcaaaacacaattcttagcttctgtaccaggcattggcaaacttttttttgtaaatagccagagagtaaatatttcaggttttctggatcgtacagactctgttcagctactcaactctgccatcacagcgtaaaagcagcctttgatagttcmtaagtgggtcagtgtagctgtgtttttatacaacttatttgtaaaatcctacccaacatggytggtaagtgcagcggcttgaacacagctcactccagccttgacctcccatgctcaagcagtcctctcacctcagcctctcaagtagctggaaccacaggcatatgctaccatgccctgccaatttttaaattttttayagtggcaaggtctccttatgttgcccaagctggtctcaaactcctggcctcaagcaattctcctgcctcagctttccaaagtgttgggattgcaggcatgagccattgtgtgtccagttagcaaacactttttaaaagcataaaaatgaaaagtagtttatctactttgcacaatactaaatattttggaaaattactttagcagcaggtagctcctactttatgagtacatgtatttccaaaaacttatatccatgcctattgwttagaacaggaaatgcactttcccataaaaatatgggatggtttggttttcaaaagaattgtatataatgcataattttctgtgaaaaatacaagcacacaatccttttgaacatctatatgwtttatttttgctgcattacacattgaaaataagcacttatagactaccttcagaactttatgcctttagtaatcatttatgtcatgatttctttgggacaaggtttccagtttctgagtagggatactgataaaatgatttccacatttcctgttgcttcttctctccagtctttggcctaaatggctcagtaagattgacagttgctcagaatttttctatctacatgctgcttatacaacaaatttcagttaagatgctgaaataaacagaagcatgaggaatttgatattcttaaagttaggagtcacagattgggagtaggaagaaacacttytaagaagttcacaaattgcagaaaccttactttctgatctcatctttaattaggacatagatgcagtttgaacttaaaagttggttgttaaaagtcttcagaaaataaaaatatttattctttatatatgcattaaataaaattagcaaggtcataagtgtggtgacggacagatagctcttctgctatctggggtgtatgggttaagtgttcaacacatttacccttcagctccctaagggtataaagcctcttcagctgtttttctctgttcccatccatagttgctgtactttcgctctagaaaatggtaggacaggtcgaggaratagcacattctagtgggttgtgaagtggattagaaatgaacggctttcctggtctggcctgtgtcactctaagttgtcctctctctttagtccagggggtggtggttgtcagccttgtggggatgagtggactgagaaggagaatgtgtgagacatcccacagtgtacttctagtgaaatataaaagtgttaagcagacttttaattgatagtcccattttttaattttttaaataaaattaatgataagcatagattcagagtacatatacgggatatatacataccattttgtaaaagcagtaaatatcaatctaatttttttttttccagaaaccgagcatagttaccacgtggaagagacaggtgagattttaatttaattctgttcttaattagagtgagtcttcctttaaaagggcatcataaaatacataatatctattattaatgatatatttaaattaatatatgcaagatatgcaattaataattttattacgtcttatatttatggtatttctttgtgaatatacttttttgtgttttgatgcctagttcctgaggataaattttcagtaggattactagttcaaaagatacaattgaattgcatgttttgtacctttcaattacagagtcaacgaaaggtctaaatcatgttttgtcacatgccagcgcccttaaagggcatggccacaggaggtgggcgcatcatctgtcagcactttactgttttgcggtttgagtgtaaaccagttgatgacaggccccccttactcatctttgcatttggcatttaacacacttaatacctatttgtttcaggagtgaacatgtttgaatatcattatgacttgattttgcatttcaatcataactagaaattgtgtctttctggtttcgaatattacatgtattccttatttgagacrtaatttcctaattattccataatttatagtttcacaagactgtaatcaggatatggaagagatgatgtctgagcaggaaaatccaggtttgtaaatgttaaaattatygatatgtgttttctgattgaggcagtggccaaggccgttttattccagggttaacaattgtgattcaacacagagatccctgtatggtatttataatcacttttgattggtcagatgtttatagaaatgtctgaatatagtttaatactacatagagggatgagagaaaaaggagacgtatttttcaaaccactgttgagactttggtctttgtaggtaaggtgctggaaagaatatttgaaaattgaaggggcagtatgatgtactataaagtcattstgggtacaaatcccatttctactctttcctatctttttgacttaggcatcaaattgtggaacgttattcagcttaaattttattaaatgataatgaaaacatctatctggcaaagttgtgaagataattaatttatgaatctcctagaatgctgtctggcaatgtgtttggttttttcctgtttggcaaaggtgtgtttttgttttttagattccagtgaaccagtagtagaagatgaaagattgcaccatgatacaggtattagatgagcattttcattagatttaaaatrttaccttagatttttcaatcacatgctgtgtttacatggtgatttttcttttaaaggcatcaaagaagtaatttcgacatctaatgcatgagattttgttttataacaaagttagactgttataagaatatcaggctttcatatttcacctcatcaactaaccattccataacaaaacaggatgtcaaattttaatgctgtttttgtgtatcaaattcctctgtgccaatttgagaaattttaatgaaaataatttacctgccttttaattgcttttgggcagaggcatttattattgactgagcagacattaatatttgaaggagtagagttctgtgtttacgattaagtagtattttgttttaactgaacaattgtatagaatgactcagttaatacttattttgcttttattctcttttttttttcagatgatgtaacataccaagtctatgaggaacaaggtttgcaaatgctttcttttttttttttttctttttttttttgagatggagtttcgctcttgttgcccaggctgcagtgcagtggcacaatcttggcccactacaacctccgcctcctgggtacaagcgattctcttgcctcagcctcctgagtagctgggattacaggcatgtgccaccacgcttagctaattttgtatttttagtattttagggtttatctcaaactcccgatctcaggtgatcctcccgccttggcctcccaaagtgctaggactacaggcatgagccactgcgcccggcctgcaaatgctttctaaccttaagccaccttcttgttttaaaatatacctatagtttgactacaagatgtggaacattatgctttaaactataaactttgcaacttaaaacatccagatgaacggtagcgttcaaagaattcacttggggagactgtttacccattccacggcttctgccattgcctaaataatttcttaaactctttacaagttgccttaggaggcagttacagtcattcaagaaaaccaatctcagtactttatagttgtgtctcttttgactaaaatatgcatgaacaactactttagccggagttaaattgctctagctgcttctacaggttaatcccactctcaaagatgactgatttgtcaccttggggaaggttaagaagcactgtgttccaggcttaaaggcagtatggagaaaacagttctggcaaatttgtggcatcagcagcatctgattcagtttaggcctgtacctccctcctcttgtgtccaagcattgcatagactattgtgttgaactccatgaagtagattttattttccctgcttcccagaggacagaaataaggttctgacattataaataagctgcccaagaatgtatggctaagaagtaatagaaccaataatatatcctttttattccattatcytcaaagatgattatgtagaaagagagaagtcagttgggtataactttatgtgtaaagcaagaacratgaagaaatacatcgtaattgagttggtggatatggaggactttctatgttctagatggttttagggcctggaattcaawtatgagtaacatagggtccctcctttcaaggagtttacagtgtcatgatagatagtgaatcacaattgaagaaaattaggagtgtttataaatatgaatcatatttatatgatgatttaagatttgagaccctaccaagttcatcatctatagtggctatttctaatgggatatgaatgacaccatgggaaaaatcctaggttgtgtctttaaggtactgataatttttatgaaaagttaaagaatttggacctgatgtgttcacaggaagatttggggccgagggaaggttggggaataatttggtcttgagattgcacttagattttctttccaatcttgaatttgaaggagaaaataggaatttataaatacaagttgcatgtaatgatgggatttgagatattttcctcatttctactgatcattataatgtttttaaaaatataaagaacatgtttggaatgcaatttgwrgactaaatctagaggaatttaaattcaaactcataagaagtataaaattagataccatgcgaaaagaatgttatatgttttcatagggcagagtatcataataaatgtaatttaaaatgttagcaaaaggcagtaaatataacctaagagattgacatgatttggtaagctactttggatttctttgttatatagaacataaactgtttcaaacaaatagatctaattgaacagtgtattattcactatatgctaaaacaatacctttgtgaaaattcaggaatcagagcagagaaaccaagtaactgacatgtaagtgaagctgtaagtagggtgaaaacaaaaccacatttcaatgggagaatagaatatattctgtatgaaacttgcaaaccccagaacatacacttcgatagaactatagtaggaaccagcttctacatcaaagataacctagaaatcatcatgcctacattggacaaacctgggaagtgacagtatggccttaccatgtaattgacttatttattcatacactgtttagtgtcttcggtctgaaacacaggacactggagcagttctagtgaagaacacccatggttcctgttctcatggatcttatattttagtagggtagtagaaattaaacaagcaatttcactgtagttttcatttccagttgtgataagtgctaggaagaacaagtacagtggtaacaagaatatgtaatcaagagaccttacctagtttgtggatgaggcagggccttcctgaagtttgagctgaaggtgagaacaattgacaaggcaaggagaaaggtgactggagagtcgtatgaggtctctgacgtgaacttgcaagagtaaggctgaggtggtgaaatgggctgggttcagaggatgcctgtgagcaagatcaaggacgttcatcttcacctttgagcactgccaagtcagatctgcattttgaaaagattgatcggtctggcatgcaacaaacagactggagagacaagagtcaatacagggagaacagttaagttagctgtaatcatccaaattgggtctttccgtgcatcacatctctctctgtctgaaggaaccaaaggagatgagtttcaagaaagggatgttcagtggtgccctgcgctactgagaaccatgtgagatgagtgctgaaaacctgccctgatctggcgctgcagtggcctcaacgggtgactttagctggaactgtttcagtggacggataggacagatatgatagtttaaaccaagggtggtggcaatgatggaggagggaagtgggcaaagttgagaaatgcttagaaggtaaaattggcaggtcttcatgcatgggtgtagctggggggagacaacaaggtgccaagagccacatacactcttctgcttctgcagcctggtgacagggggtgctcttttcctaacgtgggagagactggagtcaagcacggggcaggggctcatgagtccagttctttacatgatgatagtgagatttctttgaggcatctgagaggagagatcaaatgagccatttggtggtgtttgactctcagaagagaagtctacttcgtgattgtgagtgtgggaaccatcagagtagttacgtggtcatcaggaccaagctctgagatcccttaaggagagcagattgagggagacatgaggtggttctatggctggactttgaagaaagccagcatttaaggacggctaagaaaaagatgaagtgaaaaagaagattgagtgggagaaacgaaaaaccaaaggggagagtatggtcaccctgaagtccaggggcaacagtgtttggagaagaatggtgttgctaaaaatatagcgagggctggcgagtgtccatcatatcaaatgaggcactggagggggtctcagcaggagccttttcagggatggggtcagggtctgaagacaggcgggagtgagttgaggggagaggaagagatgagccatgagatgtaaatgactgaagaaattagattgttcaatggaagaaagagagggtgacgagaagcaagcttaagaaagagtggtattgcatttttaagttcttagaagcttgagcatgtttaaatgctgacactgctcagggcaacagagtgagcacacattcactgctccttcatctttcaaatgccccaaaaggacaaaacgacctattaaacattgttccctgctgtaccccaatactgagagtgtctgaaagatagtaggtgctcaataatttttctttattaaatgaataagaaagaataaacttacaaccatgctgggaaaaagaaggatgttttcttgtagtgtgccagaaaattggaggtattttggaagatcaggttgactgaggaagctttgagccactgggccctggagaggcctgtgtggagatgagacttccttgcagcagagcagagaagaagcactgagcctcatgccagcaaatgagggaggcaagggcagcacgccctaattagggtggggaacgcttcattctcaggggctggcggcagaggtgtttggccccaggttagaggtctgagaattgtttcctaaacaaagcagggaatctgcccatgaacaccaggatccagttgattcccagggtacagcttcggctaattcaaaacctccaccacagacatgaagaaaattttaaaaaggtagtaaaattttaaaaaggtagtaaaaagtggctgccctggaattagaatccaggcctgttttaccctagaccaaactcttctccaccctactctctagtcggctgtttcccagtgactgaaccttgcaggttcaaagatgcataaggcattgtctctgcccttaaagcatgttgtcagtttttgtgttacaatgaaagttacgggattttgtttctgtktttttttttttagcagtatatgaacctctagaaaatgaagggatagaaatcacaggtaagttttttstgkaagcacatattttctgcaagtcagctttccctgtattttgttaaaasdcctacctgtggaacaaagagtcagtgtagaaaaaatgcragrsaktttcaagtcagtaagaaaataattgagtatcaaaattwaagtkarkattctaatataaatactctgcagaagacccagtttaaaaagagtcaaatttagcaatctgagtggacacgagttaatttaggaatctgaatgaaggcgagtgaatgtaagatgtgtcactggtcagcaacatgtaatggattctgattttattctttattttagaagtaactgctccccctgaggataatcctgtagaagattcacaggtaattgtagaaggtaagataaatttatggaagtggttttaccttccatatgagaattgtgtttgtttattcagttatttatcgaacatttcctacttgctgtctatacagtgcataggagctaggagtacaagagggaagaaaacacagagtcctcttttcattggggctggcattccagtggccaaacagataataaataacgraattaaggattatgagaagtacaatgatagtgataaaaacaggctactgtaacagcaaacaattgatgagggtgtggagggctaccctgagtagcagcaggttaccacccctgaggggtgakctggtgagaagggcatagctatgggcagagaygggttgaaagatgggtctttatgtcatgactcacctgggaaaacaaaacaaatttttttttttttggtggtggagaactgaagggatggtttctgaaaaacaaaaataattgcatgtattaaacagtggcgcttcaatagaacttagatttaaatacagttcttagttagcattttacagttatttcacatatattatttcagttgctcctcgtagtaggcactgagaaacagggagcgtggagatctttgtacttattttgcaaatgaagacctgaagctggagtgaggtcaggtgactggctagccctaggtttcatagctgtaagtgaccaaggggatattcgacccaagactgggacctgtgggtgactctgcgtgggggtgtgaaggtgtgagggaatggggtctctgctttaacaaccataagttgccagggggagcatgtaagagggagaattttgctcttacaattactcttaaaatttaggagcagctaattgtcacctttcagattaaatgttactgcttttgagcttggttaggcagaaaggaaaatggaatggtgcagttgactgaaatggggggagataggtataagggaatcggggaggctaaaattgctgtctgtgtccgcttagctgctgcgagagacccctgtacaggcactctgggcccttgtgtaaaggcaggatccatctctgtgtggcaaggctgaattgagttgagattttttcccaccttgtgttactcagttctctatgagggatattaatgttctgaagaatattactgagtctatatgtttatttggtgagaatcagaagatggaaacccataatctctgggcagaactttctccaacctaccctacatatggtttatagaaaagaactatgcaatttgaccctacctttcttggtttagaaatagttttttcctaagacttttcagtattttgatatgttgacagaggacatagcagaggctgctaagggagtttcctgtcctgggcagtgaggcacctggctatgcacctgccacccatcctgcagcttctgtgctgggctcctgtagtgcctgagtggacagtgaggggagcttatctctcacagcaaccaaccttgttttccctgtctcctcttctcttggccggttgtatcaatatatacttggattcccagaccagaaacatggaactcgtttttgagtcctctctccctctgtctctatagctaatcccaagacctgttartagactccctaaacatttcttaaatccatttttttctccatagctcttgtatagccccttgtctggctcagccctttctcatcttcctagataatagcagtagtctgctagctagacatcttgattctgttcttgtcccctccaaacccatctttcacatactgttaggatgatctgtccaaaagtatagctctcattgtatcagccctgtgtttaaacccttctgttattctccatctgtgtcagtaaagttactttcagttgcagataatagaaaacgaaactcaaactggcttaagcaataaagagataggtacagatcagtcagggccttgcaaggcctactaaggctttttggattatattctaggcacagtgtgaattatgaaaattcttaagatatagcataatctgatttttgttttagatgtgaaagtgaattactttcactagattgaatggagcaagaacggaagcagagcgaaacaccctgttaggaaaatattgtgtactaatccaaggaagtgattgtggtagcctgaaataagatcatggcagtgggaatggaggggaaagtgttgaactcgagatatattttagaattaaaattaattgaccttcctgatggttgtgaagcaaagatgaggaataaagggggtcttttatttggtttcagtaactattagatgatggggccatttatagagaagaaaactattattagaatgtattaggttggtgcaaaagtaatagcaaaacccacaattacttttgcaccaaccttatagaagaaactggtttaggagagaaaataaaacgccccagatcagacattttaactctgggagttatgtgatatatccaagtgaaagtatcaagtggggggttgaatatgccaacctgagctagttgggtgagttttaagatgaatataaacatttgggagccattgtcgtrgagatggtattaaatccatggaaactgatgtgatcattttggaagcaagtggagagacgataaagaggcatgcccaggactgagctctaagaatctaatattgtgaggttgggtggaaggtgaacagccattgtgtgaggaggaaagccagtggagaagtagagaagggaaaatgtgaatatgtttcatgttgttgttgagtggcccaggaatttcaggactgagaagttatcagttgcatttggccacgtagagattgtgagtgatcttaccaaaagccatttgagtaaattaggggaagagaaagccatacagaatgaagtgggttcaaaaagacctggagtaaggaaaagtaggctataaaataggtaacccagattgtgctgatagaattaattcacggtttactttttagaaatcatgttattacatcatataccagaagaaatttcatatgagtttgttgaatgtatattttttgtaataaatttagatgaaaatttaacttgcaataataataaggctttcttagtataacatcagtgttggaaataacaaaagcagcaactaatactttatgatgtacaatattttgagcgtagaataacaaaagtaaaagaaattctgagaaaaatattggcaaagttgataaagtgttaatatgtctccaaataattaagaacaaaataaacaggcaaacctattaaaagccagtcacaacatagctattcaatagtcactgtactgctgttataagaagaaaatattgccagatactaacagtggttagtgggaatgggtgtgatttttgttgctgttttcaattacttttatgtgaaatatttccaaatattctgttttgagcatgtgtcattttttataattagaagcaaattaatgcaagaagaaaaattattaaaatagctccataagtgttttctgttttagaaaatactgttaaaatctttcttttggccaaagattgttaacaattcttaaggaccaaaaggaatgttgatataatcttatctctaggttaaggtaatgttaaatgggttgctaggtttgaagatattaatatgtgatgtaatttcatggagcaaatcagatcactatgtctttaaatcactgggtggggacatctaccatctctttaattgtaactgggttgaagcaaccaaggaaaaagacaggatattaaacattcacatccatatctttgactagtctcagaatatattatctggaatattagttttctaaaacaacttcatgaaggatagtgtttgatgttaaagaagaaataagatactttaagtgtctttccacagctctcttatcaaatctgatgcaaaattgtggtgaaagcataagttttagtccatagctcctttgctgggcagtggagtttgaggttagtcgggcaggtactataaaacctgctgtgctgaaccgttgagaaatacacaacattttgctaagttgtagctgatcattctttgttgtgagggtatagaagcctaatgtttttattaaaatttcarttgaattgtttaaaaaatctatgaaaagtatcatcattacttaaatctggcaacgcatattttaaacactgatcagcaatatgtaacagattataactttattatttattttagaagtaagcatttttcctgtggaagaacagcaggaagtaccaccaggtatgacattttgtatgttgtattttcctcttttgttatccttaaaaatcctgttaatattaccaatagctttataatgaatctacgaaggataaaaattttgagagagattaactgtaccttaatttagaatttttctgttttgatcagttcaaccaaagtaatggaaaatgcacatcagattcagtgcagtacatatctgctgagctagaatttgaggagcattaatgatcatatgattttgccattatagatggtggtagtagtggaagttagagtttttttgttttcctctttgattgacaggctatttgatggagaatatggaatcagaattgccttgggatgaaagttgaatagtgtataaattgtgacattactcctcttcctctccattccccatctctcctgagagcatctttagtgctttgtgacagtccaggctgcccagtgcttgtcagtgtcccagggtgtttccttttagttcactgcattacatacttttccctgttttttcctactttcctctasctgagccctcttgtcaccagttaatataaagaatggtaacagcatttccaccaaagcctatgctttcaaatgcattttagagatggcataaactatacctgcaaccagaagtgagtttataaacctcgtactctcatagtgggaaagaatgttctatcaaacaggatttggaaaatcctacctctttcccaagtgtatttcttctcatttctgcattttatttttgtgtcatatttatttgttcaacctttacttatattttctacattttaacatgaattttgtagcagtgatgtgcattcctattactgattttggtagaactaattgtgcctgccaaaatttattaaatactaaatttcaattttctttctttaatgataaaaaaggataaaataatcaaagaatatatttagttatatrtgggatgccttaggttttgatagttgtcctgccatgtacattaataataattatctgcagaaacaaatatttgattaagagaatggaattgttggtattataatatgaatgagaaaagcagtccatggagaaattgaccttttacatgatgactactaggcagtgtgtatttgtgtttaaaatacttggacagggcaagggcagctgatatttatgtccttctgctggtttccttttcatttttgaatactgcttcacagagtaccctgtttgtatcaaagaggcaggaccagttacagaattagcattttgatgactattccatgacttaacagaaaattattttatattcctaaaaataatgtttgtacaaattaatatatttctagttatagttcatattttaaaatactgatctaatttttgtgaagatatgaaagataatatttttcagaccaaaaatttctatacttttaacattttataactgaacccaatagtttatttggaatgtaaatatgaaacaccaagtttctgaggtgatggaataaggtgcttttttagatttttaagaaccaaagcacatacaaatgaagatctgattaatatgcatagttcccgacctataataagctcccagtaagttttggctatgactattgtttagtaattaattagcctgatcttagaggtagatcaagatctacctctgtgatggatgtgagggccatctggctgtgacatctgtcaccccattgatcatcagggttgattcaactgatctggctggccaggcaggtgtccccttcatccctctccactccatgtgcatccctcccaaagctgcatgctcagttgaagagcatgaccgtccccgatacaggaggaccagtcttcagtcaagggtatatgagtagcacccctgctggaacctccaaacaagatcaagagaagctacattctgaaagacctcatggagaagttgtaacctgtaacttggtaccataaaaatttgaatgatccactgcattgttgtagtttgaccctgccagaagaggatgtaaggctgagagtcagcaatacagtcatgtgtcacttaatgacaaggctacagactgagagtgtgtcgttaggtgactttgtccacgtatgaacatcatagagtagcctactacacatctaggctatatggtacagcatattgcttatagactacaaacctgtacagcatgttactgtactgaataccataggcagttataatgcaatggtatatatttgtgtatgaaaacatacctaaacgtagacaaagtatggtaaaaatatggtatagaaaattaaataaaaagatatacctgtatagggcacttcatgagtagagcttacagcactggaatttgctctgagtgaatcagcaagtgagtggtgagtgaatgtgaaagcctaggacattactgtaccctactgtagattttataaacactgtacacttgggctacagtaaatttattaaaatttttctttaataattaaccttggtttactgtawtttttttaaatttgtaaacctaatttttaaaaactttttgatgattttgtaataaaaattagtttaaaacacaaacatatcatatagccatacaaaaatgttcttatatccttattttataagcatttttattttcaatttttttaactttttaaacttttttgtaaaaaactaagacacagacagacatattagcttaggcctgcaggatcatcaatatcactgtcttcyaccgccacatcttgtcccattgaaaggtcttcatgtgtaataacaggcatagagttgtcatctcctatgataacaatgacttctggatacctcctgaaggacctgcctgaggctgttttacagtaaacttttttttaacaagtaagaatatagtctaaaagaaccgtaaaagtataggagagtaaaaccattaacagtcctttattatcattgtcatatattatgtattgtgcataattgtatgtggtttgctttaatacagctggcagtgcagtagatttgtttacaccagcatcaccacacacatgagtaatgtgttgtgctgggacgttatgaaagctaagatgcatctagacaataggaattttcattatcaaatgggaccaccatcatatatttgatctatccaaaacattgctacatgacacatggccgtatttttaaccattgcacttggttttcttattttctataagtcttaagtcttactcttagtcctaccacatgttacaatttttttattattcacttgtgcaatcttcataaatctgtatttgtggtatttttgcacagtctaattttgcatctgattgtaggaacactaattatagggcctacctccttgccatttttcaatctttaaaattcttttattcagtggaagactcaaattgaggacttctgcaaagtgctgaatattagttcactttttcttttcccttggaacctaattgacgattgatttgccttctctgattatcctaatactaagttatacagtcttaatatagcttattaaagttcataataatgtaactatcaatgtgctaatcccaagtggcattatcaccattgcctccatctaaagtagggaacagtgaatttcatgtttattaagcattatgtaggcgctctgctaagcacgttctgtggattgacctttaatagttctaagaccccaagaggtagatatgccattacctccattttacagatgagaacactgaggcacagcaaggccaagtaaccttccccaggtcacagagctgacaagtggtagaaatcggattgatccttgcattctggctccagagtccacactgtcagctgccgtttttcaaaggattttaaataaatgaagacgtgacagctgagagatttgagagcagttttggtgtggtaaaatcagatgtgttatatattcttcagcatctttctcttaatctgcattagttcatcacataggcctcaggaatgtcaaaggttgagttatgatgtatagtagaaaagtaagttgtccagtagtttgcattctgccttctttcttgcatatttataaatttgtaagtgctgtgcacgtggattcttggcaagcatgtggaagcttaagcttaagatttgatttttctgatattataggccaatcactttggatattagatttttaagattgattttggaatttctcatccattagcaggttttcacctttctccttaaactcatagttttmcttgaaatcatacagcatatttgtagcaatctgacagcataaatatacacaacacaaatggaacgacttatgaaggaattacttgtgaaagctcattggagtaaaatttcctctcaaacaatactttaggtcatatgactgagtctattaactatttttctgttataccctgccagaaaagaattttaaaagttagtttatgttttgtgtaaccatgttcttcagaatgcaggtatgtgagcatcatggtttctgggtaattctgctgctcctgtctttgaaaatggagataccacttgcagcttatcccactgctgagtattccagcattggtagtggtttcactccattgcatccatccagaactttcacacaggcctccccattacccagcattttttaacattgatcaataaggcctataaccagatttaggctagcaacaccagaggtctgggggcaagggtggaaattgactttacattcttagtagctaatattccataagtgctttatatatatattgttgttattgatcatctattcaaaaaatatatattgagcagctgctgtggtataggctctgtgctggccagtgaagatacatgattgacaatgttgtgcttgcttggttcacagtcctgtgggtacatggtggagtaaaataagtacaattaatttctcagagctgtgcacagcaacacacagaaggagagataactcacccagcttcagaggggtgggacagagaatgaggttagcctcccagatgtccttgtgctagttttagctgttttcaggtgttgataaaagctccaggagctggcaggaggagagcagaggaagctagagcttacaaagcacaaaggccatgacagcatgccagacgggtgaaagaggacaggggaaatgtaggcaagtgtctcttctcagaggatgttatatactatgtttaaaagtgttgatctgctgggcacagtggttcacgcatgtagtgtcagcactttggggtgccaaggtgggaggattgcttgagctcaggagtttgagaccagcctgggcaacatagtgagaccccatctcttaaaaaaaaaaaaaaaaaaaaaaaaaaagccgggcttggtgtcacgtgcctgtagtcctagctactcagaaggctgaggtggaagaattccttgagtccaggaggtcaaagctgcagtaggctatgatcgcaccactgcactctagcctgtgtgacagattgagaccctgtctcaaaaaataaaagtttggatctttgcctaaaaatgacaagaagtcactgaaaaaatccaagcagaggagtcatatgatctaatctcaatttgagaagttagtccagcaaggaggtagagactagtaagaagcagctaccgtaggctaagccaaaaatggtgggagcttggctgcagtagaatgaatggaaaggtgcctgatttcatggaaactggagctggaaataatttgatgggggagggagaggagtccacgttcctacatttctggcttgagtccttgtgaatgaatggcagaatgttaatggagatagagaaggcaggaagaaatggagagtagcagaagagatgacggtcctggttttggagatgtgggatttgcaccataaccacttctgaatggggtcttcagacatttattggaattgttcaaaattgtagtagaacttttagtttatttgcctttttataaatactcattgttatactttgaacaactttccattttcccagggtacttctgaaatgtatcttcctctcaaatcaaagtccagaaaattgttgaatgccaagagaatctaaaactcatttaaataaactttttctattggggtataatttatacatgtggaaatgctcaaatgttgaatttttccatgcatatatactcgtacccgttactcagatcaagataaaacgacgtaaagcttttaacaccccagaaatgtctccctcttcctacctctgagtcataccccaaccagaggtaaccactcttgtgaactggatcatcgtagattagttttgtctgctcttgaatttaagatccataaacacacacatttgtttttgcaacttgtttctgttctacatcttgtctgtggtttcatccaccttgttaagtgtagtcatttgctcttattcataactatttcctacagtttttaatcactgttaatggrcacaatgagtttttttccctcaattgttgactatgaagaaagctgctatgaatatttttgtaatgtctttttggggaaatagaagcattcatttatgttgggtatgtaaaggtatatatagaatgtctagttgttcccaaacaattccacttacataaaaagttttggttgcacatgtgtagatagatagatagaaattcttaggaaagtaggaaggaagaaaggaaatattgggatccagctttaaaaattatatcaagattttgcagggcctttctgtgcaccacctccttttctagtttaattgtaacacaaatccaattctgtgatagtaaaacaaatcagatactaaagttaagaatgaaaaaaaaaattgtaaaaagttggataggaatgaattttacttcttttaaaatacttatatacttttattgtcaaccatttatgttattttaattttcaaagcaatatattttaatttttattttaattttttaaaatttattttaatttaaaatttattttaatttttaaagcaatatattttaaatgcagcttatagtgtccagttgatccttgaaactgcttcttgtatttatttttcaaataccatactagatttctgtttctttttaatagagtgaaaatattgaagaaagaaatttaatgctgtgtttcttaaaagattgagattattcagttcagttttaattctcaagtgctcgaaagaacctgagattttcatcagcagctttgcaagccatccccaggggcttctttcggtagttgattattctgttaccaagttgtccttaaaaacaaacaccaaaaaaaaaaaattactttgttggtgggttttttaaaaagtagaatgaaaatgaagcagtttcacagtctgtgtctggttggtcctttaatttagatttccccttatttttgcagatacttaaagcttcaaaaagactgcccctaccaccacaggaggaccagcctaaccatacgctccaaaagatggctgtgatagatcttgtgaagcaattactgagcagatcaagatctttgggaaggaacactaaagatgttttgaatgaattatagtccactggcattttagtgtatttttttttctttttagaaacacacatttctaaaaatgtcatgttacattcctgcatgtcccttttgatagcattagtggatccattggatttcttttttctttttgtgagacagcttttagtcttacctgaatttatgtgtgtttttccgacagtggttaataattatattggtgatgtagcagcaattgtgttggcagggttttcatatattattagtaattaacactaactgttggactgacttgtgtacactgtgttaaacatgatttaaaagctattaagagtactttgtgttagcactcttaaaaacgctaacagagatcatcattagctgtgaagatttgagttgtatatacctgcactgatattcttatcaaaaatttctacattagctttaagtgttcagattaacacttttgaaatttttgtagcttttagctgattaattagaaaaatttaatatttcagtgaaagttttaaattatcatttatttatttttttaaatgagaggggaaagctgaaattccttgttaagacacaaggaaaaagaatggccctactattatcatgcaaaaatgctttgttggcacctcagattaatcatataatagctatagtctcttcagcatttgtttaaattttagaaaacctgtataaattactggtgcataacttaaagattattctgcctttggctaattgagtaattcccctccagcactagagaccgctcagtgctcttactagatgaactcagtaacgccttgagctgggttgattgaggatgtgtgaaaagctcacagagcccgatgcctgctgctatttcacggcaatgagcctttttctttctacactgaagattttcttcttatttaatgtggtttattttgggctcagaaataattgctctgttgaaaataatcctttgtcagaaaagaaggtagctaccacatcattttgaaaggaccatgagcaactataagcaaagccataagaagtggtttgatcgatatattaggggtagctcttgattttgttaacattaagataaggtgactttttccccctgcttttaggattaaaatcaaagatacttctatatttttatcactatagatcatagttattatacaatgtagtgagtcctgcatgggtactcgatgtgtaatgaaacctgaaataataagataataagaaaagcaataattttctaaagctgtgctgtcggtgatacagagatgatactcaaattataataaaactcttcattttgtgaattatagaagctactttttataaagccatatttttttagggaaactaaggagtgacatagaactgatgaatgagyaaaagtaagttttgctggatttttgtagaactctggacgttgaggattcattatgctgtggttaactttaaatatttttgaattccaaatatctgaattaatgagccttgtctttacaaatatgtgccattgtgcaacatcggtggattttctaaaaataatgtaaatgtcttctattaaatgttgagtgcaataaaatacagaagaattctctatattgtcattatttttgaagtataaggtatttttaatttgttacataataaaatcagttcattttatccttactagtattttagaagattatagcatttttgataactaaaatcacaaaggaataccttcagccagttaacgtatttctaacagataatgcttattttgcatttactatcatgctacattgccaggaagcaagattaaaattaaatagcccctgcagccatcctttgtagattttgtcctgcacctagaagttttgattattccctggacagcctgctccaccttttttccccaaatttttaatttttgtgagtatataatagatgtataaatttgactatatgagatatttygatacagatatagaaaatgtacaataaattattgttggctatagtaactctgttttgctatcaaatactagatcttattcattgtatataactatatttttgtacccattaaccatcttcacctcctgctcccctctcccctcactacccttcccaacctctggtaaccatccttctaccctctacctctgtgagttcaattgttttaatttttagcacccacaaattagtgagaacatgtgatgtttatctttctgtgcctggcttatttcacctaacataatgacctccagttccatccatgttgtttcaaatggcaggatcttattcttttttatggctgagtagtactccattatatatgtaccacattttcttcattcrtctgttgacagacccttaagttgattccaaagcttagctattgtaaatagtgcaataaacatgagagtgcgtaaatttcttcartatactaatttcttttcttttggatatatacctagcagtgggattgctaagagaaaacaatggggaaattgtccaggactttggtctaggcaatgatttcttgagtaataccccaaaagcacaggcaaccaaagcaaaaatggaaaaatgggatcacattaagttacaaagcttctgtacagcaaaggaaacaacaaagtaaagtgataacccacagaatacatcaaaatatttgcaaactacccatctgtcaagggattaataatgagaatatataaggagctcagacaacttcatagggaaaaatctaataacctgatttttaaaatgggcaagagatctgaattctcaaaagaagacataaaaatggcaaaacaggtatacgaaaaggtgctcaacatccttgatcatcagaaatgcaaatcaaaactaccttgagatatctcacctgagttaaaatgacttttatyaaaagacagcagtaatgaatgctggtgagcatgtggagaaagaggaaccctcatgcactgttagtgggagtgtaaattagtacaaccactaggaggttcctcaaaagactgaaaatagaactactgccccaccttatatatcactttttaatgggaggatattaatttcatcgtgagtggatggaagggcagaaatggatatggaaagttctcttttccatttccagtcttcattctctggacagaaaaggagaactaaataaggaagaagcccctggggttctagaacaggttgtttttagccccagcatgtccagaagaaacaaaaataaacactaatggtaagcagacccacttttattgaatgcacccactctgcggagtactgtgtgcacatgtcagggagctgagttttctcagcagataagtattacttctgcctgcaagtgagcaaagccaaggtcagagaggtggggtgcctgctggcccgaggtgacacaccagtatccagagcaactctccggcagctggtgcaaggtggaagccattggagggaggccaaagagcaggcaggaagatggttaggcaactaactagtaataggtgatggtgatacagcatgagctaaggaagtgctagtagagaaggagactggaaagctgtgacgtgaggactggtcagtctgggtgcttagggagagagcagtctcatgtcctggtgcagggaaagaacagatgccagtgtggtaatgcactcagagggatgaacaggcctgggtggaaattcactttgaatgtaccttgagtccagcaagaactgctcagctggcagattagcgcagtggctggaacacgagtacagtatatctgttttttgtttgtttatttttgagacggagtctcagagtctcgccctgtcaccagactggagtgcagtggtgcratctcggctcactataagctctgcctcccggattcaagcgattctcctgcctcagcctacygagtagctgggactacaggcacgtgccaccacgcccagctaatttttgtatttttagtagagacagggtttcaccatgttggccaggatggtctcgatctcttgaccttgtgatctgcccgcctcggcctcccaaactgctgggattacaggcatgagccactgtgcctggctgagtacagtatatctgaatccaccaaagcgatttgctttagtggttgcatgacaatatttaaagatcaatatcccattctttttagtaaggtgtttattgttctgacaaaatatttaaaggagaaaaaacgttaagacaggtaaagagtagtgtaacatcttttttttctgaatacgaatatttaaagactaaatatgagttacatgtgagcttgtacttttgtaattttcagggatgggctgagcatatagctccctttagttaatgaattccccattactgggatatagagtgtgattaaagtagtattttatggaatatagtctctgaaattggttttgtttgttttgtaatcctacacaagattctttagcctctctatgcctcagttgccttatttgtaaaattataactacctcctatgaatgatgagaagtttaaatgggatagtctgtgttaagtgcttagaacaatgcctgtatataatacgtgctcaagtcattttcctctttggcacagtgaggttcatatgaggtctcccagagaagcataggtacagagaataaagcaaagtatcacttcattattatctttgcagagtgctagtggggtaagctgaatctcacagaaagctcctttacctaagctaaatttaagcaataaaacttgtagagcctaaaacgtattctctgtgtattttcttttcttttcttttcttttctttttttttttttgctcaagttgcagtaatttatgtataacaatataaaactaatgcaaagtattactattatctctgtgtattttctccatatccgaaatgagtctcagaactcagcttcttgatgtgaggtgaaggacagaagaggacaagaatgagaataagagagcttttggcctggggcctggaatgatctggtccaggctttaggtcagactgccaacccccttttagatacagcatgggaagttgaagaaagatggtggcccttgtttctgggcatatgtccaaccacactcaccctccacgttcctgggaggacgtgagtctaaaggacatgaggagacccggccagggccctcccacatcgggatcagcaccttccacttctatatggaatgtgaccagttcaaaccactcctccttccttatttccctcccaagagtgggaagatctgtggagagccctaaactccccttcatgaccagcacccacctgttctatctagtccagttagaaacttgcattttacgcttgatttttctaatcacattagccttatgcaatgactgggggatgtggagggttgcagtgttcctgcaggtactgctgatcccactaggaagagctccttcaggactggaattttttatgcttttcttcattgctgtatctccgatgactacaaatgtgccagacattagtaggtgctcagttaatatttgctgaatgaatggtattgaatagtctagttcagctacctaactttataataaggaggctatagttaaagagatcggaaattctagaacattctaccaagacctacatgtccttaaaaaaaaaaaaaagtcctgcattattcttgcagcactgcgcaggaggtatgtgctgtaaaccctataaaatcaatcaactctttgcaaaagtcaagactggcacttctctttgaagaaaggtacacagtggttcagtggaaaaaaagtatgctttggaattatgtaaactgctggccttgatagctttggggactctaatttctcagccatctattttctcctatgcacaaagagggaggtaagaccttctccacagggtgtgagaagacaagagaattcataaatgatgtgcttagcacttagcctggcacgctagatttcaaagttagttttcctttcttcctcttatgtagagtctcaaaggagcaagaacacttgacttataaaaatcccttccctgcattaaaaccagcctcagatttacttttcatctccccaaattgaaatgttttatatgaatgaatgtgggaaactccagaccaacaaattgagtgatctgtgtcaatgttcacttgaccgcatccctgatctcaccgacatcctcttgcagcttctgtgggagaggacagagtctggttttttatcaatctcccagactctgccttgttccctctccaacctatgtgcatacgaccgtattcctagaaatacacaaagaacagataagttcctactagggctgtaatcaagtgattgccgtgaaaattaactagatcctaatttaccttacacagtagtcctgatgtggagttacaggtgcagaaatgaggttaaaaacacatggtcagctcatatgctgttgttttccatgtgaggggtggatgttctctggctagtctaggctgttggtgggtgtcactgtcctaggtaattctatttgtgggagagacactgactgtgatttacttagtgcatctgacacaggtggggtcttgggttcatctctggcttctcatctgggcttcagcacaagctcccccaatggatcatctgtgtatatgtgaagtccttagagtagcagactaatattccaagcagtgtgacatgctgcattcctttaaagcacatgatgtcaattgttcaagtagttttctggttttaagagacaataacaatattgaacaagctttaatgatggcttctccccatccacatgtytttgtaccttagagacacttggagttgatgtacatcacccactccaactctcttatcttatagacaaggagtacttagcctggtgcctagtcagtgcttggtgacttttagtataagtaattgaaatatgcccaaatcttgatcttttctaatgaacttcatgtgtaatgaattcaggatttaggaaaattgaattgtrtgctcagatatatttttctttgattatrcttattgaattcatttaaatattgtcctatattttgagatactgaatggtgacttgcatagtacttactatgttttgtctttaattttcagaaacaaatagaaaaacagatgatccagaacaaaaagcaaaaggtgagattgtcaaataaacagcctttaaaatatacatggggaaaagaataacatgattttatgttccatccaagaataacatgattttatgtcactaattaaaagaatttgctcctgggtttgttatttcaatgatttatcaaagaacacttattaatattttacataaacattaagagccaaagcacagaaagaggttgcccagcttctaattctagttttgacwtttgcactcttgcgtccttgggaaaaatacttaacttttgtgcctcagttttctcttctgtaacgtaggaataataagagtaccaacttctgaaggctgtgtttccatgatagtaataaaatgaaaatatacgtaaagtgcttaaagcaatagctaacatagaaagcacttaggatatattaaatatcatttattgttgatatgtcaacaactgtactaggtataggaatccaaagattcctagaacatgatatctttttcaaggaactctgaattgttggaaagatatacaaacaaagttacagctatgcagaaagaattatttctgcctgccaaaagtttattacaaagtttattacaaagagttaaaaaattatatggatgatcatagaatagtggctatttttagtatcagttgaatgatatgatctttaataattgaatattattacaatttcaggaatgcttttaatttaatttgtagtgatgaaagcagtatctacatatgtatcttgtacataacgtgcataagatcttacttagtgtgcaaatgatacttggtgagcatgtggaattgctggcctctggctgtaatttcacagcccacaagttgagaagtaggcctttaattcatgaaaacttttctaactagttgtttttaatttttgtcaaagtagtacaaggatatagtttaaaaagttgaggtttataatgaatagcagcagtcctcttccctactacttcatatccccaagtctcactcctaactttcttttagctgtttctttctttctttctttcttttttttttttttttttgagatggcgtctcactatgtcacccaggctggagtgcagtggcatgatctcggctcactgcaacctcctcctccctggttcaagcaattctcctgcctcagcctcccgagtagctgggattacagacacatgccaccacgccaactaatttttgtattttttaagtagagacagggtttcaccatgttggccaggctggtctcaaactcctggccttgttgtaatcctcccacctcggcctcccaaagtgctgaggttacaggcatgaaccaccgtgcctggccttagctgtttctttctagtacttagttatgcatttctaaataatttgtataatgctgcagttttctccttaatatcagaaaccgttggctgactctgttttatagatcggtgagattagctcgatcatcatactctcacaagctctccgctgccttacttcctggatcttccgatatatttaggacataactataaataagatagcgatacctgctaatgagaaaacacaaggcaagaaggggcaaatcagcagcttttgatagagttgatcacttcctgtccttcaaacactcccttcacatggcttgctggatacattctcttggtctttctcctgctctctactgtttgcttttctcaggctctttggatggatgtttctcatctccttgaccattaatcaccggagtgccccagacttagtcctcggagcatttccccatatacacgcactctcttaatgatctcatctaatctcatggctttaaatgcctctgtatgccacagattgccaaatttactcacagcctgggtcttttgcctgcactctagactggtgtgtccagctgtctacatgttgtctgcctgataacttcaatgtgttggatgtgtaataatcacttcaaacttaacaagtctaaaaccgactcctgatctttccccctcaaaacacacttcatccccttaaaattagtgtgccaactacatgccaggaattgttctagacaagtggttgcaggtgagagcaagacagaccaggttcctgtttcagggaactcacatcccagtagggagaccagcagtacacacacagactgaaattgtggtaagagttctgaggaaacaaagcaggagagcatgccgtaggcagaaggggtggtgaattagggaagaaggtgtcccaggaggttagggaaacctaagcactctgagcagaggaacagtttgtacaaaagtcctgagacaagagagaagggcccaagaagctggagcacctgaacaagcctagagtgtgtaagatacagttagagaaagtcaaagactagaccrcagtgggagtctggacttttcttcatgctgtggacaccgtacccagcccatgcacatctgtgtaccaaacagagccctttctcatttacacattgactggtttgcttctgggaggttcactataatgcattcttacaaagagagggacagggagtccgaatggtgggcatggcttgttgcagataaacagaaacacttgcaaacctgccccaaatctgctgctcacagggcagttgcaattgtgagctcctcatatctctgcctctcatgctccagacctcccattctagtcttagcagcccgtaccttcccctgcactgtcgggtatcctcggtgcacaggtctgacctccagggatgctgatcctaaagggggtttgccagggaagtgtagaggctggaacctctggaacctgcaaagaaaatcattgcaacggcttctgttgactggtttgtcactctccccccatttaaaattagcactttagatcagtaccaaccaaaatatgtttgtaactaaagtattttattaagggggaaatgcaggaatagacagaattaaaagaaataatgaatcaatgtcatcacagatttattaaaaatctattggagcaaattgtgagctgtggaaattccatgtattttttattcaaatcgattcatatgatactgttatctggtaaggaaaagggaaagggaaacattatgtaaacattacatatccagaatatgtagtaaaaaaawggaatggccttcactcatcagactttagtttcataataacagaaactgaaatttttttaaggcaaaataggccctcatttgcagacatctgttacttgagtcaaatcagattatttttatgttttagataaaattgcgatatcagtttctccccactggatgtcatcttttcccacatattccatagcccatggtcacaaaatgtgtgaactacaaaataatccaatacaaaaatggcttgttaaatgtcaaattcaaacagtcattcrtgttcatccatttattgagtacatagtgagtacttatgatgtccaggctctgttttaggcactgggcccaaaacagtcaataaaacagttgcagctctcattgtacttgctttttagtgtgtataggggagagagtggggctggatatgtagttttaaaaaattaaaatataagaggcagtgtgaagtgtgaaaaggaatataagacaggaaaggaaaacagaatgagcaggaggtgttgctgtgtaataggcctcttggatggtgacatttaagcagagatttgaagaggcaagggcaggagttgcaccggcgtctgggagaagagttccgagacttggggagcattctcatggtcctcagggcatgtgtgcttagcatgtttgaggcctaacaaggaggcgattgctggtaaagaaggtatgaggggagagtgcaggagtgcatgagaccagagtggtcaagggttcaaatcacataggctttcgaagacaaaagtaagaacttgtgtattacctccagtgagatggccattgggagattctgggcagaagatggatatgattgcattatattttcaaaggctcattctggccataggggtgcaagactggaagcagggaaaccaattaggagactattgcagtggtccaggcaagacatgatgatgaccaggattacgatgtagagtagaagtggtgagtgctggttagattctacatatatttggatataaagttagtagggtttgataatgggtggaataatggagtgagagaggtcaaatatggatctatggccaggcacagtggctaatgcctataatctcagcactttggaaggccaaggggaggatcacttgaggccaagagtttgaggccagcctgggccacatagtgagatgctgtctcaacaaacaacaacaacaacaacaacaacaaaaacccaacacgtagccaggcatggtagcatgcgcctgtagtcccagctactcgggagtctgaggtaggaggatcgatgctgcagtgaactatgatcatgccactgcactccagtctgggcaacagagcaagatcctgactcaagggaaaagaattcactctaacctttaaaagctgtactttgacaaattcactgaacacaaaaatgtgcaatatgttcttgatttagtatattatcaaaggtcagttatcagttgggatttgtgagcctttaaagaaatttgaagagcaaaggaaatgtgttttttcttgtgtgtatctatgtgtgcacgtgggtgggtgggtgttagataaaactgtatttgtattgtggacttttcctaaaattttttatttagacttatacttaatatcttattaaattattcattacaattaagaatatgtttaaacagtatttacatgtctttaaaacacttaaagatttcctgggtactatttgtatttttttttaaagtcataatcagggccctaacaaaacaccagatggcgctagaaaacaaatcacatttacactaacagaaatcacatctgcaaagcaacttaaagaaaggtggagatggctgtattacagccagtaaatcagcttggtgcaactagtacttcatatggatagttcttagttttctgtgatcataaagaaaatagaacagacgtagctaataatcaagtgtcattcagttttcttatttaaaaaatcttcagtgaagttttccttgtgattcttataactgtatataacatatttgaacaaagttctctattgctttgatgataaaaaaataaacttcttagtgcagcacatgacgcatctcaggatatagcccctgcttatggcctccctgtgttcaaaatgctcttcctaatcgctccacttcccttttatcactcccatttcttaaaactgagcttagatgttctgtctttcaggaagccttctctgactgcactcccatctcctaccccagaccagaaagtgtgtttctctttttgttcccaagatgccttgtgcttacagattttttattagcacatattttgaattttccttttaatttctagacaaaaagcttattaagagtaggaaccatgaccaacccttatccccttatattaatcagagtttacagagttctccagagaaacaaaaccaacaggatggtgtatgtgtatagatatagaaatagatagagatttattttaaggaattggcttacgtgattgtagaggctggccagtccaaaatcckcagagcagagttaatgttgcagcttgagtctggaggcagaattacttttccttggaaggagataagactttttcttaaggccttcatctgattggatcaggactactcatattatggagagtaatctgctttactcaaagtctactgatttaaatgttaatctcaccaaaaataccttctcagcaacatccagacatgttcaaccaaatatctgggtaccatggcttagccaagtagacaaatataattaaccatcacactattctagtggtgcttaaccatagatagtgggtgctgaataaatagttgtagtatgaaaaaaatgtgactaacccccttccctttcattcttgccccttcatctgatagtgatattataagatgcatatagcctgaatggtgggcaggaagaattataaacagaaaagtcaaactatgaattaactttaagtgtctacaaatatacttgctacatttcaagttattttcagatgggttcttgtttaagccttacccatcaatcttatgagttaagcatttttcagctaccatttcttcattttttaaatcttctttctcactcccctacttctgtgcctataattaaatgtatattggattgcttgaaaatgtcccacaggtctatgaaactttgtttatttttagtctgggcatgatggctcatgcctgttattccagcaatttgggaggccgaggtgggtggattacctgaggtcacgagttcaagaccagcctggccaacatggtgaaaccccttctctactaaaaatacaaaaattagccaggtggtggtgtgtgcctgtaatcccagctacttgggaggctgaggtgggaggatcacttgagctccaaaggcagaggttgccatgagctgaaatcacaccactgccctcaagcctgggtgacagagcaagactttggctcaaaaaaaaaaaaaaaaactttgttcatttcttaatcattttttcccattggattgcatgctttatattattatatcttcaagtccagtgattctttcttctgccatttcaaatctgtgttgagctcatctagtaaagttttcattttagctactgttctttccaactctagatctcgaactgcttcttttttgtagtttccatttcactattaagattccatgtctgtttactcattaatactatgtttttctttaattctttgtacttatttatgatcaacaatttgaagtatttttctaataaacccaatatttgggcacaatggcaggcagctgcagttggctcctttttttttttttcctgagactgggtcaggtgattcctattttttttgcatatctagtagtttttggttgaaaactggattgtgtatgtaatttgttatatcaactttggaatttgttttggtctttctgaggactgttggtgtgtggtagacagttaacttggctggactcaaattgaaaaatctgactctccaacagtgtaaagcagctaatatctctgctcaggatttttggcttttaattgctgtgtttaaagtctggtcagaaagggtggcggtgtcttgtgccttcagagtttacttgtttgccaaagatttgagtagaattcatactcagattttgagacttgcttctggaatttccccttgcttctgggattcactatctaaatttcagttgcctggccaaccccaagttctgccctcttacacctcaagccagtagaacttttatctcctctattgggaaatgcactcaagcaaaacataacgacttgtactttcatcagaagctgctctttccggaggtagatttttatagtagtcagcctcgaaggcagcctccagtgattcttgcctcctggcattcatgcctctgtgtagttctctgtctattgaataaagctgacctgtgtggccgaaagaatattgcagaaatgacagagtgtgacttccaaggctaactcataaaaaatgttgcagtttttaccataatcccttttaatcgctcactctggaggaaacgagctcctgcattatgagagtatacaagaagctgtgtccatatagcaaaaaacttgggaaatacaataaatgtttatggctgttgcaaggtgctgaagttggggatgatttgtttttgaagtcattatagctaatccatcgccctcaaatttctgctagctttttcaccaggctccctggggctacccatgaaggtggcaactaagtcagccagggatgctttggcttgtgagcttgggaagtatgaagtgtggtcctttcctttaaaaatttattcattcatcttattgagatgagaactgtagtgcctggctgcaaagacaccatgaagttgcaatcattcagtctctgagggtccattccattgatgcacatgggcttgatcaagccatcaccgccttgaacttaattactgcatggttagcctagttagatctgtctttgtctttttgctgcccactggagatgctttagccttgtctttagcagtcctgaaacactaggtattcctcattgacaacagcctgcctagatgttgcagcacaggctggtggttcagttccagctaaccactatgcctagtaatttttccatgttgttgaagagcaatgtagcaatagcataataaaccaactcaaggaaaagctttgaaaaaacagtctcccgtccacccttgcagctgtgaaaagagattatgagataactgctcttaaagatttattgtagtcattacattcaacagctacagtagttttagtggttcctaaaatacaccagcagttattgtctgattacttccacagataagttaattatacaagatttctgactctcatacaagtctgatttagagagaagtttaattatggcaattttagtgattgaaataagctcagcatatatcatcagtcttagcaagtatagtagaggtttttagctgtgttaaaatacacattctctttgtttttatttttcatttcatgatttctaaccatagtgtagtacatgtgataatttaggacacctgttttcaccagagtgcatcttcagtcaaacacaccacaggacaacaatagcaaattcttcattatcattaaaatcccattctaatgctgcccatggagcactccacattttacaaagctaatttgtataatgattgtgacaatgtgagcaggaaagtaaaatacttttcttaaggaaaaaaaaatcaggtattggtatgttttaaaatgactgttaagattgtaatttttttaatgatggaagatgtgacactccttcaaatcaggcaatgcacttcattgtttatgaacacattgtctatttctatactgaggcaaattaaagattaactttaaccacatatgcttaaattaacttaaaattaagctttcaaaaaatgtgccataaaaagacagtgctgtgagtagttgaatatattcatttatttaaacaagacttcaaattggtgagtacattagtttgaaaaatgctttactgaaaattaccttagtctgagccctgcagacctcttccccatagcacttttcattcttctaatataatggtaggtccagtggcatttggagcagtagttcctgcgatatttttatatttttcacttaaaaatcaaatatatattgacaataggaaaatattaataatggtgaaaataaatcaaattctgttttaatttgagtgattttattacatcctgcctgggaagccagtctaccgcctttccttaacactatgaatgtcagtcatgcctttcctctttgctgcaatgttctttcttcttcctcttcatccattgggatccaccccacagtcctttgctgctaccatgcccggtcagcagtgacagagatgtgggtgagcatggaatgaagattaggcatctcacaggcagtgtctggagaccacgcgggaggcagcaggcaaatctgtctcagaaatacggagaaacctagcctcatagggattctggaacagaccacaagtaaagctgccagcagaggatgtttgctaacagaaagcaggatttccacgtggaggggtagcattggatcctcaaagtactggaatagcacagaaagccccgtcgctagccctgccacgtcgttaggagctggtccaggatgaaggtagcagggcatgagctcagtgccaggagagcagccgcactcgtggtgtatcacctgccataatgcttttatctaacttcccctttcctcctcgccctccatctagagcacctgaagctaatgtacggataattaactgctattgaaaccagtgatgcacccaaacaaaactaggttctccttaggcaccactgtatactgtagcatttcccacccctacctgcctgctagtctaacccagctctgtgtcactgctggccaggcacagtgagagcaaaggactgcaggatggatcccagtggatgaagaggaagaagaaagtgcggtagaatcacatgggggagagttcagacagtgccctgggtcccaccctcaactattctgatttcatcactctaggtgcaataattctcatgtgtagtcatggttgagaagtgttagttaagatacgctgctgacctagtcagtctggtctgtgtatcaggcccatcttaactaaaaatttttattggtatcacctgattcagaaatcattttttgacaatatttgaatccgatttgaaggggttttttaataaaatataaagccaacaaaaggatcgtttgagaaaagctgaacctgtagtatgaaaaaaaattttaagtttattaaacagctattttaaagataaccatatgagccacaaatggtaagcaaacctagctgtactgaggagctgaggaaaccttgcagtgcttccttctcatggcgtggacagaatactgagcttggtagttgaggcagctgttactgcctgaatcttggcggagacccttttcatctcatgacccatgttctatctcatcggcagactctcacctcactcagctccattcctttagcaaaccgtgcaaattttaatcaggactaaaagactacttttaacaaattctcagttgccctctatacatgctcaaacttcagatatgaaagaacaagatttttatcaatgatattttcaaaggtctagctttttctgatgccgtcagttactactgcattgatgccagcaagtgctagaagaaaggtgagcctttcccagtgctgcaaatatgttgcctgggaaagacagcaactgcctctggcctaggactggagagacccacttgaccactgtctcaagtcccccatcctccttcctgctcctgctgtcctcattctccaccctgatttcagcagctgagagtagacactatcctctttgagatttttgctgcttaactatttgaggcaactaattaaatcctcatcatgtatgtggggacatgtcatttactgaacaaatattgctgtataggatgacgatgtttgagggaaaacataaccctaataataaatggcagatgcattccacttcgtttgttcactttctgcaaagggacttagctgtgctttgtactcagaaggtactcagcatttcctgggtcattgccatagaccgattcatgggtctctcatgccagaaagaatgttgtttttttttttcctttaactcttattattaaagtaataagaaaacattactgagggcataacagtacttctttcatggttcccctcctaaattatttactactagatatgttaaccacttaaggtgaatatatagcactttatgttgcgaattctaaactcatttcaaattataaatacatttgttgagttggtcatggtagaataagagaacactgatttttgcctttgagttcatttttaaaagtcagcgtgtatggatgaacggagtaggagaaagaattatatatattccgacacactttcatttacagaggactcatttgcgtctggtgaaagccaggcggcttgcaccatgtcctgggacttcagccatcctttcatgtgttgacccttcttaaagaatggaagggggaactgaataaagaagataacagcttctagctaagaaggatgatgcattagtttgccaaatatataggctccttttgtgtgctatgctctgtggagcgctctgaaagcaaagcaagtaactacaatgtaaagaggtagagactatgaacaaaatgctgtgggaacaccaaggaggaaatgacacactgctggcaggagatggaaagcaactggagtcttcatggagcgatgacatttgagctggtcctcaagtagtgggtgaggattacatccatgcaagagccctgtgaacccagatactgaagtatgtctaatgacaaggatgataagttgatatggaaaaaaaatcacaggtgtttctgctcacagcaagcccagcagtactccaagagcagtacttaacttgggtgtcatgggctatgctctctatacagaagattacattagagtcttgtcttaaaaaccctttttgggaaaattatcataattcatttttttctaatatccaatgacttttacgcttttgctactttgattcatcagtacgttgatgataccttctcctctttgtcccattcctgcttcatgataatttaatgaaattaaagtaatggatttaattagcacctacatctatgattatatgtatatattatttatctgaaacctttggggtgggccagctaccacaattaaaatatcaacttgattcaagttgtgtgaagcacactttaaacttgaaataaaagtgaataaaatctatttatacagtgtgatgcctttaattgataccctttatataaaagccaaggtttgataaagttgtgtttcaggtaataaccttgatttttatgcttcattgaaatttggctcctctcccccaaggatcactgacttccttgtgcatttatatcatcatagtagtgatgttattactaatgtcattcagctagtcatagggtggaagtagcattaattgcaaattatagcttcaacataaaaccaatgaacttgggtgagcatttaatttctgggccttgtcactttgattcatactgcgtctttgccttttaactgctgctgtgagcatacatgtgcattctctgcagtatattttttcatggcacttccagacagtcctaagagtcaagcagtataggacccagcagggtatgtgttgttgcgccattaattgcatacctctgcgccttctgaggaaggaggccagaggcagattgtctttcaccccctgagaagtatgataatagcttgacagtgctcttactggagtatttctctgtgattattaaatacaagtgaagagacttgttagaaagagagaaaaatgaggaatattttaaaattgccttttagattaatagtatcaaacacacttagtgcattggtactagcgtcatggaaatacacaagaggtttccattcttggtcagtctgagtttggggtttgatctggtgtgtttttagattaaagtgtgwggctaaatgtgatgctggaggtcaaggctcttatgagccctgttcttttgtctgcttcagcttttgagtagctattattatcattttatcagtgagcattttccttataggcatatgaattcctcttactagtgtgaaatcacttatttaattctagaaaattcttgcagtacagtagaaagggttcttgactaggagtgttaatcagctttaccaattcttatttgctatttcatcttgaacaagtctcctggcctctctgagctttttctcccatgtataaaacatggagataattctacctgcactcctgcatttttcttgcaggtcagatggccatttggctttgtcgctggtgtcatgctatacagatatgagcaactattatcattactttccctccagtgattactttgtataaaatgcatgttatccctaagtccaaatgcaatagaagagtaatctgatattgcttgtgtatgttccttttctaaggggctcttaatgactgtgataaactttatccacatgacattccaatgtctttaagtgcaagagaaaggtggttattcttcagggatatttttctaggaagtgtttatatgtgaaaacaaacatctacaagttgaataagttatgagaatattggaaagctatttgaggaatgcttgtagtggcatctcattaaagcgttaagttatgctttccttctaccttgggtgttacagctttattaacactgagtttgaaaacagctaacaaaaaaagctaaatgcttaagggatttattataaaattcaatagtgccattaatttccatgtatgctttaaattgctgggaaaaagtaatgtattcagcaaagaagcaagttcctgcttcctcccctgagtctgcctgattgtgcaattggtctctcattctttaattaaacttgtccaaagataggatccgctaaaatgtttactgtataaatagttttcattcccagtgtgcaagtttaaaaccatggtaaaaagtttgtcatctgttaacaaccaaaacatgtggtgtgctgttgcataaaaataaactgcacattattcataaaagggatcacaacatgtatcacatctttggggctgacaataatctgtgatgttttggaatgtcacctccttctaagtgacagtatgctcagtagtgcattatgttaaaaaacatgatcgtctataattgtaataaaaataattcatgtattgttattcaagtgaaattgatttatctgaatgtcagtgttactgataagaaattataatttttaattttttctttgatattttcaaatctaaattttcctgagttttattttcaagtctttttttcctccctaaaatttaaccatttaatttagccaggaatttaaccatttctctctctttctgtactaccattgcctcggccctgtgacatctcaggcttgtatatcacatccagggagtcttcttgcctctagtttttgcctttctgcatatatgtacctaccacaagagaaagttcttgaaagacaggattcatatgctcactcattgaagccatcagaaataccacattgtctgtggagcaaagtcaaaattcctcagaattttgttcaaggcaccccataatctggctgtaagccacctgtttagccttggccctaactatccatgtccctgtactttatagaattccacaagatttttcacaaatccctgaacatacctttttcacatttatatgtacatactttcccatttctttgaaatatttttcgctgtctacctcattccaaattagatctgtgcctcaagagtcagttctaatgttctgtcattccttaattctttccttgtttttccaattagtggtaatcctttgcttctttctgttcccagagcattttgtaattcttactttgcatgatcattttcagtcttttattctagtcattaatttacttcccccctaccactttctaatgtgtgaagtacttggggatagggattgtcttgtttatctttgtgtccccacactagttagcataatacctgtgaggcactcaataaatacgtgtcaaaatggtttgaaaatggtcacacattgtgttctggagaatccaataagcaaactaatgcaatggaaaaatttagacaaacaggtcagagcagattgtcatattccacataggatttttttttctatgtagcagtagttatggatgtcctaaaatgattttggccctttcctattcagtatttcttaatggacaagagtggacattaatagacattaatatctcacaagattctgcaggaagttctgatttgtttcacacaaaacgaattgctgtctttggaccttgtttaggtcccatttcaaattaacaaactctataaatttttaagacaatcagggaaatgtaaacactgattattcagtgaaagtatccaactatgatattcagaaattattgtgaatttcttttctctttttttttttttttttttttttttttgagacaagtctcactctgtcacccaggctggagtgcagtggtgcgatctcggctcactgcaatctccacctcccaggctcaagcgattctcctgcctcagcctcccaagcagctgggattataggcactgaccaccatacctggctaatttttgcatttttagtagaaatggggtttcaccatgttggccagactggtctcgaactcctgaccccaagtgatctgcccgcctttgcctcccaaagtgctgggattacaggcatgagccaccacgcccagctgtgaatttctttttagatatggtaacagtattgtggttatatttttatatgtttattataacaacttcactgaggtatagttaatatacaatagacttcacctaaagcatacagtttgataagttttgccatgtatgaaactgtaaaaccctcaccaaaatcaagataatgaccatatccagtgatcccaagtttcctggtgctgctctgtgacttctcctggatgttcttcctctgtgcccctccccaaccccaggcagccactgatccacttaaggtccctacgcattagtttacatttcccagattcagtggctggaacctccagtaaaatgccaagaagttatgcatggacatctttgtctttttcttgatcttgggggcaggagagggtagaattcagtctgttaccgtttagtattgttagctttagatttttcatagatgctcattctcagattgagaaagtttcctatgtctacactgcttaaagttttttttcaggaattggttttagatttagtcaaaggctgttctattgtctaatgaaatgatcatatttttttcatttttgtgtataatataaattgcactgattaattctagatgttaaaacaactatacattaatacatttctgagataaaactcatgatgcattattccttatatatcttgttggatttgatttrctaacattttgataagaagttttttacatctgtgttcatgagggataccagttagtagttttcttttcatgtagtatctttttctgattttggtttcataataatgcagaccccacagaaggagttgggaaacaaccccttctctttaagaatttatgtatgatttctttattacatatttgatagaattcactagtgaaggtgactgggcctagtattttgtgtttggaaagtttttaaccataagctttatttatttgactgatacaagatattcaggttatttgtttattcttaagtaaccttgggtagtttgtgtctttcaagaattgtgttcatttcatctaatttgttgagttaattgacataacattgtttataatatttattgtttaataattatagaatctgtaatgatatcacctgactcattcatgatgttggctatttatgtttatttgtgtcttctctctttttcttgatcggtctggtggagtatcaattttagttaacttctctcaaaatcagctttatttttattatcttcctctggtattttcttgctttctaaattatcaatatgtaccttgatctttattatttcctttcttccacttattttaggtttaatttgctgttcctttttgaggttttttttttttctctctctctctttttttgagatggagtctcactctgtcacccaggctggagtgcactggcgcaatcttggctcactgcaacctccgcctcctgggttcaagcaattctctgcttcagcctcctgagtagctgggattacaggcacccgccaccacgcctggctaatttttgtatttttagtagagacgaggtttcacgatgttggccaggctggtcttgagctcctgacctcgtgatccacctgcctcagcctcccacttacaaaggtgtgtattttactattgttgcagggagtctagaaaagtcatttaggtcaagttgcttcataccactgttcaaatcttctatatccttgctgatgttctctctgcttgtcctattaattactgatggagggctaccaaagcctctgatggaattgtggatttttctattctctttaaagttctgtcaggttttgtttcatggattttaaagttctgtaactaggggaatgaacatttagattattatgttctcttaatgaattgatttatttatcgttatgaaataatcccctttatcattgagaatattctttggtctgaaatctgctttgatattcacacaggcaggcacttcagctcttttttattgtcctttttattagaatgatatgccattttctactcatttgcttttaacgtatttgtctttatatttgaagtgtatttattgagttaccacatagctggctcttacttttttatccaagctgaaattgtttggcatttaattgggagtatttatatttaatgtgattattgctatgattagatttagatctattatcttgctgtatgttttctatttttcatatttcttctttgttccaattttcctcttttaccttcttggctaaatttattcttaggttttttttgtagctattataaacaggattactttcttgatttcttttcagcttgtttgctatggtgtatagaaatgctactgatttttgcatattgattttgtatcctgtaactttactgaatttgtttatcaagtctaaaagttttctggtagagtctttagatttttttctatataagatcatgttttctgcaaacaggacaatttgacttcctcttttccaatttgggtgacttttatttctttttcttgcccttttgctctggcttggacctccaatactatgttaaacaagagcagtgaaagtaaacacctttttcttatttcagttcttagaggaaaggctttctgcttttctccactcactgtgatgttagctgtgggtttgtcatacatggcctttattatgttgaggtatattccttctatgcctaatttgttcagaagtgtgttgtattttatcaaatgcgttttctgcaactattgagatgatcatatggtttttgtcctatcgatgtatttttttttattttcatatgttgaaccatccttgcattcatgggataaatcacacttgatcatggtctgttattttttagatgggttgttggattcactttgctaatattttattagggattttcgtatcaggaatatcagtgtgtatttttttgttgttcttgttgtcgttgttgtgtcctgtttggctttagtatcagggcaatgctgtcctggtagaatgagctaggaagaattcccttctcttcaattttttggaatagtttgagaattggtgttagttctttaaaagtttggtgaaattcaacagtaatgctatgtggtcctaggcttttctttgttgggagatttctgattcagtctcattacttgttattgatctgttcagggtttctgtttcttcctagttcaatcttggtggttgtatgtgtttaggaatttatccatttcctctagggttttcaatttgttagtgtatgattgttcataatagtctctgatgatccttcgtagttctgtggcatcagttaaaatgtctcatttttatttctgattttatttatttgggtcttctctccttttttttcttagtcattctagctagtattttatcaattttgtttttcttttctttttttttttttgacttttttaatatactttaagttctagggtacatgtgcacaacgtgcaggtttgttacatatgtatacatgtgccgtgttgctgtgctgcacccattaactcgtcatttacactaggtatatctcctaatgctatccctcctcactcccccgaccccacaacaggccccggtgtgtgatgttccccttcctgtgtccaagtgttctcattgttcaattcccatctatgaatgagaacatgtgttgtttggttttttgtccttgaaaaaccaacttttcatttcattgaacttttgtaatttttttttagtccctattttgtttagtttttctctgatctttattgtttgtttctttctactagttttaggtttggctttttcttgatcttctagttctttgaggcatgtcattaggttgtttatttgaaatctttctacatttttgttgtaggtgtttagtgcttataaacttccttcttagcactactgtatctcatgggttttggtatgttgtgtttctattttgattgcttcaagtagttttttaaaaatttccttcttaattttttcattgactcagtggccattcaggagcatgttgtttaattttcatgtatttgtaaaatttccgaagtttctctccttactgcatttttagttttatttcattgtgttctggaagatacctgatatgatttcaattttttaaaatttgtcaagacatgttctgtggcctaacatatggtctacctggagaatgttccaagtgctgacaagaagaagagtgtgtactccgtagctgttggatatgatgctctgtaaatgtctgttaagtccatttggtctaaaagtgcagtttaaatccagtgtttattttgttggttttctgtctagctgatctgtccaatactcagagtggggtgttgaacttgccaactattattgtattagagtctgtctcttcctttagagataataatatttgctttatatatctggatgcatatatatgtggaattatgtcctcttgaagaattgatccctttatcattatataatgaccttctttgtttcttttttatagtttttcatgtgaagtttgttttatctgataataaaatagctactcctgctcacttttggtttgtatttgcctgcatatctttttctgtctttctatttgcctgcatatctttttctgtctttttgcttttagtttatatgtgtttcaggtgaaatgagtttcttgtaggcagaatatagttgtggtatgtgtttttatcagtttatccagattatatcttttaagtaagaatttaatttgtttatattcaaggttactattgataggtgaggacttattcctgtcattttgttaattgttttcttgttttccttttgttgttgttgtatattttttgctcctttatcgtctgttgtttatcatgcagtttggtagttttctgtactggtaacatttgactcttgttttctcatttgtctgtctgctctactagtgagttttatactttgtttatactttggtgtgttttcatggtggcagatattgtccttttccttccagatataggaccctcttaggcatttcttgtagggctggcttagtggtgataaattctgtcagtttttgcttaagaaagactttattcctccttcatttttgaaggatagctttgctggatctggtatcttagctggcaattttttttctttcagctctttgaaaatgtcattttattctcttctggcctgaaagatttctgctgagaaatatgctgttattctaatgggaattccattttaaataacttgattcttttgctgtttttataattttctctttgtctttcacttttgacagttttactgtaatgtaacttggagaagaccattttgtttcaatttatttggggatctttgagcttctcatatttggatgtctatatttcttgcaagctttgagaagtttgaaagctattatttcattaaataagttttctttgcctctgttcatatccataaattaggacatttggttatttggttgatttatggtgtcacatatattatgtaataatcttttcttttctttcctttcttttcttgagacagggtcttgccatgttgcccacactgatcttgaactcctgagctcaagcgatgcatatgcctcagcctcccaaagtgctgggattacagacatgagccaccatgcctgaccatgccaggccccttcattgtttttttttttttttttttcctgactggattatttcaagtgatctatcttctggttctgaaatttttccttctattcaatctagtctattgttgatggtgatggtcttgattttatttttgatttcactcattgaattctttagttcccggttgagttcttttaaatggtatctatctctctattgaatttttctttcagatcataaattattttcttaatttttttgtgtcatttatctctgttctcatatatctcactgagtttctttagtattattattctgattctttttctgatatttcataatttccttttcatcagaagctgttgctggaaaattattgcgttcccttggaagtgtcatgtcttcttcctttttttgtcttcatttgtccttacctttgatatctgcacatttggtataacagtcacttcttccaattttgtgaattggctttcataggaaagacttttttgctgtagaagtatctataatgctggttgtgtagagcactttgtctttgattctgggctggcgcagtagtgtagtctcagtatgatttccttggctgtgttcagcatcagtggtgtctgtgatttcctcagtggtttagctgtraattttagtggaggctgtggtgaggctctgctggggactgggatgccaggtgggctggtccttgggcatgcccgtctgtgggcccctaggcagtgtacatgggcactgatggtagtgggtccaggagagcagacctttgggccttcagaaggcttacttggttaccagcagtggctgcagtgggcaggcaggtcctcaggcacctaggcagcatgtgtggtattggccatggcagtagcagtagcaggccaaccctcaggctctcaagtgtcrtgtgcaggtacctaggtccccaggtagggtgtacaagtggttgcttgcagtagaggtggcaggctggctgggcccatcctcaggcccctggaaggcatgcacaggtgccagtggtggcagatggggtgggtcaatccctaggcccctggaacaygtgtgtaagcattggtggtggcgggccaggtgaaccaatctccaggttcccagacaacatgcacagggagtagcaggagtggtaccaggtaggacacacttgttctcacactgcctgacagtgcacatgagtgcaggctgcattgaggggtggggcacggggcaatccttacacatccagatggcacactggggcatcagtgacagtgggggtgggtggggtggatctatcttcagatccccagacagcatgcatgggtgcctgcagtgacaggctgagtgggccgattcccaggcttccagatgatatgcttaggtgccaacagctatggcagtaaaccaggtggccctgtttttaggcccctgaatggcaggtgccagtggcagcaggtggggcaggcttattattgggcttcctgatggtgcatccaggccattcttatttttatttccctgtgtgtgacatgtctattctctctgtctgcttttatgatccttattttatcactggtttgaggaatgtgatccctatctctcagagatcactgacctttattacctgatatacagtttctcacaagccattgtttcatagataatatggaaatatttagaaattttaccaagtttactctcaaccttagtatttgaagataatgtcctcctctttattgttatttttcactacctctgtttcagaaaggcaatggctttgtttttcaatatatcaaataatagatttacatccctgttactgatctataatctcatttgtctgtaatgagaaacctcccattgaaacatgtattttctctattgggtaatacatcagaaatagtttgtcacttcatcatcctgctattgctcaagtaaacttaactatttcttactccccagagaccaggatcttcacagttgggtatttgttgaaagtttgtggtcatcctgtcatgcctaccacctctactataaagcaagattaatcaattttgtaatgtcaggttttcattcttatagcatatggagaaactctaaagacactcttggggtttctctcattgtgattttcaagttgtgtttaaagatatccactctgttttggtgaaatctcagatgatatctaaaaaatatgaattccatgtaatttatttcttaaaagttataatagtgaaaaccagtcaatatcagttctgaacaaacatcggtcaaacatagatcctgctgacatctaaacaatcaaatgaaaaataagatagttcagacataggattaaaaatactgaaattattcattcatataatatatacaatagtccttccttgtccatatgggatactttccaagaacccttggtggatacctaaaactatgaatagtaccaaacctatatatactatattttttcctatacatacacactatgacaaaacttaatctataaattagtcacagtaagagattaacaacaatcactgataataaaatagaaacattataacaatatactgtaataaaagttatatgaatgtggtctccctctcaaaataccttattgtattgtattcagctattttgggactattgtagaccatctgtaactgacactgtgaaaagcaaaaccgtggataaaaggggattcctgtactaatctttacatgtagctgagatgttgcagagcaaaatcacctgtagcaatttttttggtattggggtttgggaacatctgttttgtttcaggtccttcaggagacactgatgcaagctgggcttagaaattattatttcatttgacatcactgggaaatcagtatttcatagaaacaattatttaaagatgatgttagataactttaagcatcatttaagcaaaattaataaattcgggtgatattttctaaagcattttaaaatcatttccccatttaaaaaatgtgttgtgcaaataatttaacattccctggtgactggagactataattctgattttaatgaacatcagttactgtatcatgcagtgatgcttttggggactgttaaagtgtttggcaccatttatgtctacacagtttaacccatgttgcagtgctattggagctgggtttatttcaggtttatttctggtttctgactttcttactttcagtctgtcagcttgtatccgctgctgagtatatacctgcttcaaacaaccctcactccatcttgttagtttgttacctataataacttaagggctagagaaacagaacaccaagattattagaattttatctaaaataacatttgaggaaggtggctattctctcatggaacgtgtgcgtggggataaaattcagtgtctggcactgctgttggtgaggctgcggactgctttggcactgaagggttttctgttatgtctagaaaacacatcacttagcatctctaaaatttctaatttaacatatggggtcacatctgttaaaggattattactctagaaggggagtgatgtataatttataaaaataaccctatgggaaggcagccaactacatgtaataaactggaatacttgctgtctccattgaatgctcccagcagaatctcacattagtttagtagagggagcagatgaaaacaattgccctttatatactatttactgggttgtataagttagcatctctcagtgaaaaatatttgttaactgtttggtttaagctttgaatattgacctcctgctggtatatagttgataattaattctgaaaaaacagaagtccattattcttagctgtaggaggcaagaaagagtgtgccatccttggtaagagagtctttcaagagttgcccaaatttacttcttcttctggtaatacctatagagtagatcgtgttagagaaaaaaagcctcagaaggggctatttttggatcaaacacattagcttttctttctcacatggtgataatacaaacaaaggctcctgccagaagcacctccatggctgtctgcatattgggtttctcaacagcaaatagcatgtctctcaatatgagagcagatttatttcagaccccagtgtgaggcatcacagtagggaataccttgcacaattcccacttttaaatgaaagagaaaataactgagggcgcctacccacatcccccgcctgtaggaacactcgtagattcaggtttgcttttcctgtgattagcagataacgtttcatcaaaaatcctaacatgggattcttgaattcttgaatgttttcttcttttttaccctttgccttaatttatagatttacctcactgtcaagacaaatgtagagtgatgtttcttttattgaaatctatcagtgattttaaaaagaaaagcagaattagcttccaatcctaataaaggaagattaaaataagcaggggtcctatcttgggttaactgttaattgctatgaataatattgcagtaaggttgctttatgtgatgactttgaaacttcacaccacatctcagtcagatacagagcacctttttctttaatatcttattttggtcttacttttccttcccttaaattgttttgctttttagattatttttcatcaaattccacctttgaataaccatagccaaaagcagtatttaatattttatgtgattctgcttaaaaacacatactagagtttgggaagcaggggaagtttagcatggcctcaaagctctttaatcctttgttgacttgaaatccaaactgaatgcaggtatagtgtgataaagttattagttgcccaaaatctctgccagggaaatgtctgatcatagagaaaatctgatctttttaaaaaattaactgcttaaacatttattaataagagtcaggcacatttcccacttaattaagcatagaattttaaagtaactaaaaataagatactgtagatgaaagtcataattaacatttatatgaggttttatgctccatgactttcctttactgtagtaggaaggaggtcagatattatccccatttcgtggatgaaaaaacaaaggctcaacaaaattaagcaagctgcctcagaagtagcggaactgaagctcacagactggccttcaggcttgtactctgtggtccttctaccaagccaggatgtgtctgtgtaatgtctaaatgctacgtcttgagacacaaaatgaaggaaaattactatggttatttaactgcctttatccttacagacaagtaatacaaagttcagctacttcctttacacaaataatacttatactaatacttaattccactgtgtcatcacccttaaaactcttaggaacaccctaatttcttgacttctgagccagatgccaaagatatagcaaaatggttaagagtacagacattggagtctactggagagaacccgaagcttcagtctcggtgcctactgtttacagtttgtgcagcttgggtgagtcacacatgtctagaaggcttaagtgctccataaatgtcagctgttattatcagcacagaattggctaaggcattaagcagtgactcagaacataatagcaagctgctttgggaagtttttgttattctaaaattagcgagaccttgcaatccaagaatttactgttagttgtgccttgtattctgccatgtgtgtccccatttgctcaatatactgaaaaacctacatggaataagatgtagaataaatgttagtgttccctacaagatcttcagtggggattatggtacaagtatcttgcttttttttttttttaatcttcctcttcgggcccctccrttattgaccattgaaactttttggatttgaactctataaagcaagcaactctcaggtaattttctatattggttgtttataattttctcattttttaaaagacagctgatatgcccaattacaaattcacattgccatatccccttctacagtgtcttgcttcattcatgcctgcatgcattcatgcctttagaaacatgaaaaattgttgaggatttcctataggacaggccatatgccaaatgctgttttgtaaattataagtaacacagttcagaaattaacaatccagcaagggaggaaggtgggagtgaggggggagagtttgagcgagcactgtgtatataccgccagcatgaacacagcctgaagagtttactatttctagaaatagtaatgagtatagtagtaatagtaatagaatgttatatgaccataggagagattattttctgcctaaagatgccttaaacttgatagaagaaatgacatttaaacgaggtctcaaaagttaaaatatagaatattctttggtagaaataaaggaaagggttttccaggaagataaaacaccatgagaaaaaccacagaagtgtcaatgttcatgccatattcgagagtctatataaaggaaattaatagaagaggaaaatggagattaggggccaatttgtgaaaggcaaaagctggttcaaggaaatgcaactgtgcaagagctcaagatgcacattattttccttgaataagtatagcatttcagatgggctagtgggagaaattcatacacacacacacacacacacacacacacacacacacmgagttaaattaaggtccgtatttaatcagccatacaaaattgtatcagaagcaaaatggcagcccagggcaggggcagatgctatgtccctttgcatggcttccctggccatctagagtccttcactggtgcagatgggarccacagttttccactctctgtcttgcatgttttcaaaaacccagttcttgctatgccactgcccttttgtagtcagtgtgtataccctctctcgaaaaaccttatactcccagagcaagcactctggactctactggcttttgaagcaggctcagcatcaataaagttccttcttcagacacggggagaaagcaagtcagtgtctgggatccctgagcaatatctacaccttcagcttcccaaaattctagaaagctgaaattcttattgtaagaaaatttatgtgttatggcaccaaaccctagtatccaagcaggagaggaattttagcctttcacattaaaaacaaaacaaaaaaaccaaaaaacaaacaaaaaaacctaacaataaaggttcaaattcctgattgtgattgagttacaaaataaatactctctcctctggccagaatgctacctctccctgggtatacagaagtttttagtttccccaagaaggctcccctcccaaatagattagtaccactcctcattcatcctataattgcacatattcctctaactattagttattcatgtatgtcttccccaaaagactataacctccttaagaaagatcccgttgaattctgagaacctcacacaatttttggaaaacgggcactttaacaaattcttgagtgaataaacaagccggtgaacaagatgggccctaatccacagtcctaggtctccctccactgtgggcagagtgacatgctgaggaacggccagtgttttgatgtagttcaagagtagggtgcttggaaggctggtggctggtaaggaagagggcagtctggagtagaaaaggtagctgggatgttaaatacaaaaatattccaatgtcattgagggcctagctaggtctagattcgcatgttgggttttttcctttttgtgtgcaggtaagtgtgtcttaaacatgggtgagtgaattacctcccaaaagatttttggagagtttcaaactaaatttaatttcatttttgaaaaggatgctgtttttattcccaagtgtttctcatactattacacctacacagtaagagtcttcactgagaatcatggagcttatctctgccttgtaactttttttgttaaaagtcaggttcattaagaaggaatttacatacagtaaaatttaccttttatagtgtgtattctatgatgcatatacatctagatacagcttttatccaccacaactaacttacagaactttgcaaccccctaaattattttgtgcccttgtagtcatccccttttcccaccacagcctctgaagccacttacctgttttctgtagctgcagttttcagttttccagaatgctatctaaatggaattagtcagtagccttttggactaggccactttcacttaacataatgcatttaaaattcatccatattgttgcaggtactggtgttattgctgagtagtatttcattttttggatataccacagattgttttcattcaccagttgatggacatcgggttttctctacgttggggctgttgtgaacaaccctgtggtraatatttgcatgcaagtctttgtgtacgtcttcatgatttatgttttcatttttcttgggtccgtaattaggagcaggattgctaggagggcatcccagtgaatttaatttctattttttatgttctggggatctatgggtgtattttcagcaatgtaatgacatgaataaatagtgtttcaaaaataacctgagaacaaggtagaacatgggaacagactcgagtcagggagactagttaggaaattgttgcttttcaaaatataccttgtaggagaaattgctgttttcttcactgtcttcagtggaatgggtataggacatagagtaatgtgaagattctgtgtctgtttttattgatgatcaacttctccccatggactgtagtataaaaacatcttccatgaactaagtggaaatgaaaaggagtcaacgtaatttttataatctacaaatgcatcactagtgttttcctcctgccttcagctatccttttattttccttcttttccattttgtttgctcttaatatttcaaccacagcctggcaagggaagtaaggatttgaaatgtaagtgttcctttttcttttcttctttgtgcttttgaaaaagggccaaacacttgtaatggcagtgatttaaaaacaaaacaaaactttaatttatatatagcatagatagctttctcctaaaccattttgaaagatccaaattcaacaaaattaataattctttctagtaccttataggtgtactttaaaagattatgaacataatttaaatactgaaaattagaagcacaggacttttgagttcaaagagaccttaagagaagcagcccacatcacccatttcttacccatgggtaagaaagctgaggcccagagtgctggagagagttcgccagggtcccatcaccagcctgaatgaggactcattttttctacaggtagaacatgtgcctccccagaatgagaagaaagagtgagtctgtggtttttagcagttgggaaaattgcctcaggctttctgtgtacttaaaaataaaaataggataaaatttgaatttcaaagacaggtacaatagttagaagctatcaaatatgaagatatatgaaaagatagaacatggtggcatgctgtgagatttttaatattttgtctattttagtgctgttattgaaatatcgtgacactaagatacagcattgctcattaacaagcatataattttgctgttacactgttttggatgtcctaaactgctagtttttagtttcttttaaataaatattattttaacttgaattttataacacaagagacatgttggggaaaaccagtgatgcccacagtgaaactgtctactcagctgcacaccaggcttttctggaggtctcactgtcattctgttgatagacacttctacaaaagcaaaatgaacaattgggagacataagtctgtgctgagatgacaaggcatgagctcctactaccatcaatctgtgtcacagagaaatgtctattcattttccatatcagcatatatggtaacatataatggcatgcagtttaaagctcattattcactgttttttcagtctctgccttagacacatatagctttcaacattacagggattagggtttctgggaggagagagaaggaaagtcaaataaatataatagaagatcatagcaaacaaatgtgtaagtaattaaaagatgatcagagtgtcagctttattacttgatgaaagttgaattaaaagagggggtttggataatcaggaataacagatttcttaacactgagccccagaattggacatacccactgctccagacagcatggaacagccttagttcttccatgtgagagcctctcttgcagttccgctcagcacgaatgttctcagaaggtcagctcagctcagctcagtgtgcatgctcttgagaggtagggaaggagtgaaactgaacttcaagttccttctaccaactcagcaagtggattaagtcatatcacctcccctgtagggagaggtaggagactaagtattttggagaatcttccctcttcttgggaaacacgaaataagtatccacttctttccatgtgggtgagagagtggaggggtcaaggtaactaacccttttggaacctcagtggtcttctccgtgtagttaaattccctgtgttcaggaagttgagaaaataaaaggtatctatgtatagtgtgtggccgggcgactggcgcagagtgagtgctaaaaagacagtagtgattccattccatcttccttaggatgattccatgtgctcttctttgcccttattttggttgtgttttataaccaagtttctgatttggacaattgggtgtcrttctctgcaataaagtcaatatgaaaaagaatagatgtgtgaggaatagcaaattctattttttatttactgagtttgaggtatgtgtcaataggtgcttggatttataattttcgtgatgcaggagaaaatgaactagttggtttgtagctcagctggaaattaagtagttaaagccgctaaagagactgaagactgaccctgaagaatataacatcccaaggagcagcagggagaaggagttacagaggcaataaagagaaattcaagaggctagagaataaggaagaacactgggagagtgggcaacataaaagtcaaggaaagggatcatctaggaaggaggagggcatcaactgtgtcaaatgytgcaaaagggccaggtaaaataggaagaaacagaacaaatagatttgcagaaagccgtagccattattataatagctctcaggtactgagcacttactgtatgccaagcactgtgttaaatgcttcatatactatcctgatttaaccctcaaaaacacccctaattttatagaggaggtaagtgagacccagaaaagtttagtgccagcttggcttaggtcacagagcttggaggtgacagagctgggactcagacccctgccatcgatgcttaaccacacagccytccctcctctggcagacttgcttctgcccacgtggtgggtgaggaagccaaagtgctgacaggaaaggtgacaaagaggtgccccccaggggaggggagggagcgtggcaagtagaggagggtaggctggtttgtttgtttgctgtaagatggcagaaactttggcattatttaacgcattattaaattcccaccagggggcacacgagagatgctgagagtgaatagacattcagaaggcacaagacaggtgtgtgtgttggcggagaggggaccttagaaagaacagcccgtcttcctttgtgacaagatagggaagaagctattaacgtctgtaggtttattgtcagaaaattgaggaagttctcttctgattgttttaattcgtctctatccctcccgctttgcccccttccctgccaccactccccttctccagaacattctgcttacccttcaagcttccactcttgtcacttggggcttctgagaagtgctctgcatccatccactctgcagkcactgccagttgtgcaccagcaggactggccctctcacctgctgggtgtgccttgccttcgggaggagggctcctgtttgctgggtgctgaggttgtgcacagagccaaaaactgtttgctaagtaagcaatggattgatgcttacataaacagattcagcctgcttttaagacacggtaccaccctgcaagagttaggactaagataagcgcrtgaaggattataacaaaacccctagtggggaaggaccacaaaacagagatacgcagggtgcagtggacttaaagacgcacacagtggagcagggaactgagtactgtgtgggtgatttcaggagaaactttataaggagcgtggttttgaacttattgttgaaggataggcacgtttttcacagaagaagataaagaacaggctttttatttaaatgaggtagcataagaaatggcacaggttgggcacagtggctcatgcctataaccccagcaccttgggaggccaaggcaggaggatcgcttgaggccaggagttcaagaccagcctgggtgacatagtgagactctgtttctacagaaaaaaaaaaagaaaaaaagaagaaagaaagaaaaagaaagaaagaaagaaagaaggaaagaaagaaagaagaaaaagaaagaaagagaagaaatggcacaaaaagcttatttggggatcatggggcagtctattttggctgaagtatggaacatagctggggtggtcagtccaggatgcactggaaggaccttgaatgctaaacgaagaaattctgttttatttgacttccttgagaggagccttccattttcatctttatctgtatcagaaaaagttgtggacatattcaaaaaaactattttaaacaatmttttggacatagccaagaagtagattatgagagtttaggagtcatacccaccatttacatcccagaaaccaagccagtatcctggagagtttcagtatactatccacccactctcccaagaacacattgtagcagataggtaagggctgcattgccttccttggcagtcactgacttcatcacaccatctaggggaggaaatggaaggcgagcctgcagtgtgccttctcctgcaggtctttggtggagaccagcatcaggtttcccactacttgtaaattgttatgcttaataactatttctagtcaaaaaacgttaaaaataaaaatctcttttttctttcagttaagaaaaagaagcctaaacttttaaataaatttgataagactattaaagctgaacttgatgctgcagaaaaactccgtaaaagggtaggttgatattttttgtgcaatggttttgttgttaaataaactcaggcattactcttgatttgttaaaaaaaaaaaaaatagtaartgtaaaagaaacaacagttgaatagagtggatttttccccaggcacatgaacattccacatgaaatgaatcagatggaagagaattgctaccacatggccaaagagaaatagaactttccttcaggccagccgatgcgggtgtcagcctacctccatcacattctagttatgcagctttggggaaaccacttggctcttctgggcgttagttttcttacagacatgataatgataaatattctttctacctcctaattgagttttttaaagatcaatttaaagatcaaatgagaatttttttttttttttttttggacagagcctccacccaggctgaagtgcagtggcacagtctcggctaactggaacctctgcttcctgagtttaagcagttctcctcctgagtagctgggattacagatgctcaccaccatgcctggctaatttttgtatttttagtagagacagggtttcaccatgttgcccaggctggtcttgaactcctgacctcaagtgatccacccgtctcagcctccgaaagtgctgggattacaggcgtgagccataagtgagattaaaataataataataataataataataacactgtcaagtatcatagaagtgcaagtttttaattttatagctccttgatgcaaaaagaaaaactaggtcagtccattactcaggatagtaattggtagatgaaatgacattcttcttacttagggttaacctcatgcacctccagttttcagggtaccttatttatattttaatttgtcgatatatttgaaatattacttgcatttctttatagatattacaattttgagaacaataaattgaaactggatttaagttattcgttcccttaccttggtcatatcatctaatcatcgggtgcaaaaatatttattataatgtatttaatcatatcttcaattaatcatctccttgtttttggcggaaatttgtttctctactctgcacttgaatgtagactctgtaatgttcattagttttcctgtaataggctttttaatcagtagacattggctgcaataataaaggaacaagtgggctttaagtaaacaaacaacaataaaaacactggttaggaactaaaatgggacaagaatgtacgtccrcatgtttattgaaagtgtaccaatgagcataaaggcttttggaactggcattaggtgaggctccaaagccaaggtttgccaataaaaatagagtaactccacagaatattgcagcaaagtcattgttcacttcccttaaatctaaccacgtggaatgattcctactttctgatagtaaacaagaaagttaactgtcttgtttaactttatgaagtgaagccatctactgtttgtggtcagtttgtatttcttaatagaattgaagcaataatctttttctgccacctcctttggcaacctccactttctctatactaaatgtcatatataaaaatgggagtgcctattgcacaggtgacttttggtgtaaaaaamatatgagcagctttagagaaggattttaatgtaattatatgaatgataaaggagggctcagttatggggtattctgcagtgttgctcctttggagaagttatatttttctcaaggagcatcttgaatttataccagggaaataaaagaggaagaagtagccccatatacaattcttgcttctgaaacaacaggaagctatgttattgactgactcatcaacataattcagtcttttagggttgtttttatggctagtattttcagaggatgcaccttagtgcactggaccagccgaggccaactaacacacactccacacagagccagtgcagcctcagttcatgccttaggctcaaggactatgttacatgaaagtatgtgttcgctttttatccccccagaaaagtatagatcagattatattccaatcctctattttaaaaaatartaatatttattatttaaaatgctttcctacctctggaaaaagggtttgaaatgatatactgaaatatatttgcttatttgttggaatcacttattattacagcattgtaagtgatttttgaaaaggtggggagggagtaaagaaaatktaatcaaatacctgaaagttcacaccactggctctaaaccatgctaggaatgaagtcaacaattcctcgagggacaacatggaaaacagaatcagaagataagattaatattgttcatcagaagagctgttctgctccaagtccagagagaaacatttggctgtagatcttcataaaaggtatactgatggatgcaaaacttcctacttccccactgacatcataccagtggattattctaccatgcagctgcaggaatgtatcttattatccttccgcacagcccattggcctcatgtcaacacagtgtggcctacgtccatgtctctcccatgaactgtcttggtcctaggagaacattataagctatgttgaggaacagatcattttcaggcaattcttcaaacattttgtgtcttgcagctgagtttttaaattagaattgagcaatagtgyttggagctatacaaaaacttagggaagggaaattctttcagactaaaagcaaacacatttactttgccagccaactgaagtgaaagcaaggctgatggcccctcaggaaagycacagagcctctgtcttgcagggattcaaaggatgctgcagacagagccaaaatatcccattattttaacagccttgacagtgtcaagcaggaatatctcaccttatcaaatttgttatgaacattgttattcttatgttttaagtctgatattagtacatttagcacaattatcattgaaatagctttgacagttgcaatttaagttgcatggggtgcatactaggctgaaaatagacccccaaaagatatgtgtctggaacctgtaaatgttatgttatttgggaaaaggatctttgcagatgtgattaaggacattgagatagagagattatcctggattatccagttgggccttaaatgcaatcatgtttccwcataagagagggacagagggaaatttgatgccgacaaaataaaaagtagcacatacagaggagaaagaaagcagtatgaagacagaattggatattggagtgatccatccacaaatcaagaaatactgggaatagacaaggacaaatattcccgtaaaacctctggatagagcacagccctgccaycatcttgatttcatcccagagaaactaattctggaaatctgttctgcaaaactgcgagagaacaaagttctcttattttaagccatcaagtttgtggtagtttgttacagaggccatcgaagagtaacacagatttcaatactgggcctgcaggtacacagaagtcaggaattgaggtttgggaacctctgcctagatttcagaggacgtgtattgaattgcctggatgtccaagcaaaagtttgctgtacgggtggagccctcatggagaacctctgctagggcagcgtagaagggaaatgtggggttggatcccccacatagagtccccactggggcactgcctagtggagttgtgagaagacggccaccatcctgcaggccccagaatggtagatccaccaacagcttgtactgtgtgcctggaaaagccgcagatacctaagaccagcccatgaaagcagctgggagggggactgtaccctgcaaagccacaggggtggagctgcccaagaccatgagagcccaccacttgtatcagcatgacctggatgtgagacatggagtcaaaggagatgatttcagagctttaaaatttaatgactgccacactggattttagacttgcatggaacttgaagcccctttgttttggcgaatttctcccatttttttttttttttttttttttgacattggcagagctagctgaggttttattttggaccaaaaaaaagcaattgaattgttttgtagctggaggcatgggcaaggggggtccccaggtagtaaactccccaggtgggctgagggctagggctgagcctcaggtgggtctcctgttcccagtgctaccctgaatagtggcctccttcycaggctctggggcagcgcaggaggggtaggctgggaggggctgccacagctgttcacttgggcaggatgtcagaggactcggacaccagcttcccatcacatgtctcgatcttcttcacaaccacggccctggaggaactggtgcggctgagggagctggagcctgcgccagagccaaagctggagcccaggccgtagctgaggccggggcttgtgaggcccccataggccgagctcaraccacctgcatagccgctggtggtcttcgtatgaatactcatgttctgcatcccagactycagccggctctctttgccctccagcagcttcctgtaggtggygatctcgatgtccagggccagcttgacgttcatcagctcctggtactcacgcagctgccgtgccatgtcctgcttggcccgctgcagggcagcctccagctcggacaacttggcgttggcatccttaatggccagctctccacgctgctcggcatctgcaatggcggcctccagggaagccctctggcctttgaggccctcaatctcagcctggagctggctgatgttccagttcatctcagagatctcagtctttgtgcgccacaggtcatccccgtgcttcccagccagactctgcagctcctcatacttgatctggtacatgctctcagcctcagcccgtctttggttggcaatatcctcgtactgtgccttgacctcagcaatgatgctgtccatgtccagggagcggctgttgtccatggacagcaccacagatgtgtccgagatctgggactgcagctcccggatctccttttcgtayagctgcctgaggaagttgatctcgtcagtcagcccttccaggcgagactccagctctaccttgttcatgtaagcttcatccacatccttcttgatgaggacaaattcattctccatctctgtatgcttattgatctcatcctcatacttgttcttgaagtcctccaccagcctctgcatgttgccaagctccgcctccagcttcagcttctcctggcccagagtctccagctgccgcctaaggttgttgatgtagctctcgaacatgttgtccatgttgctccgagccatcttctgctgctgcaggaggctccacttggtctccagcatcttgttctgctgctccaggaaccgtaccttgtctgtgaaggaggcaaacttgttgttgagggtcttgatctgctccttctcctgggtgcacacagcctggatgttggggtccacctccaggacaagggggctcagtaggctctggttgaccatgactgcggtgatgcctcccatgccgctggccccactatagccgcctcccaggccaccccgaaagctgctgctgcccactcaggagaagctcgaggagctgatgtgggcaccgggcccactcgtgtaggagcggctgctgaaggcccgggggccagaggtggacaccttgtaggacttctggatcaccctgatggacatggtggaggcaggagtggaggcaggcgggccgaaccaggcggagatcctagaaggagcggagaagctgcttcttggtccaatttctcccattttgaatgggagcatttatccaatacctgtacccccattgtatcttagaagtaactgatttgcttttgattttacaggcttctaagtggatgggacttgccttgtctcagatgagactttggactttgactttgggtttatgctggaatgagttaaacttttgtgggactgttgtaaaggcatgattgtgttttgaaatgtgaggacatgagaattgggagggatcaggggtggaatgatatggtttcactgtgtccccacccaagtcccatctcaaattgtaatccccataatccccatgtgcctagagagacacctggtggaaggtgattggatcaagggggcagtttcccccatgccgttctcatgatagtaagttctcatgagatctgatggttttataaggggatcttcccccttcgctcctcactcttctctctcttgccaccatgtcaggagggtccttgattcctctttgccttctgccacaatcgcaagtttccttaggcctccccagccacgtggaactgtgattcagttaaacctctttcctttataaattatccagtctcaggtattttttatagcagtgtgaaaacagactaatacaatattcgagaacatggtagaacctgtacttatattgagggaaaattcaatttctttagcaaaaccacatattacatcatttatcaggtgtcttgtctttttttttttttttttttttttttttgcgagattgggcatccttgccattttcttttttttttgkcattttattatttatttatgtttttattattatactttaagttctatggtacatgtgcaccatgtgcaggtttgttacatatgtatacagtatacatgtgccatgttgatgtggtgcacccgttcacccgtcatgtacattaggtatatctcctaatgctagccctcctccatccccccaccccacgacaggccctggtgtgtgatgttccccaccctgtgtccaagtgttctcattgttcaattcccatctatgagtgagaacatgcgatgtttggttttctgtccttctgtctttttaaaaatgaagtaaatatgtgttcattactagttttctgtttgccttaatatagctttttttaaaatcttagataaaactatckttacactcaggatggaatctaggaaactctgacaaaaccacttgctgaatattaaataacaatattgattgattattcattttaatttattttatttatgtaattttgtctttctaacagggaaaaattgaggaagcagtgaatgcatttaaagaactagtacgcaaataccctcagagtccacgagcaagatatgggaaggcrcaggtattctgagacccttctccttaggacacttttttgatgttcatgtgttttgtgtgattgaattttttactcctcactattttccctttctaatttctctacagaatcagtttctcwtgtatatgcataagcaagaaatacaattatcactattgcatgctgctgaatttagtaacatttttttctgctccccctccatatgacttctctctggctttgaaaagaaaataaacagtaacacttttgtcattgatttaccatcccctcatgtcccattccatctaatcccaccatacagtgttcacttgaggctcctcagagctttcagactctcagttttataactggaggttgcaagtatgcttaggaaagacctttctaaaatataaagtggaacatactttgatgtctctatagttttttccaacggactcatttcttagcagctacctttatcctcatctcccaccgtctcctttcttatctggctttttctagtttccaactcctttcatgaagcatgtcccctttcacctgtaactgcataaacccactgtatgtcastgttttaggccctgggaatgtctgttttgcattcttttatgagatggttagtcaggtgcagctacaagaggtctcacaggacaggattaggaaaaagcaagtttattatgctcacagagacaggaggcccagcatgccaaacagggctacatgggaaagactcaaggtgatcaggggatggtaggcaagaacgaggggaaggtttggccatagcctttattgaggtttccatggaagaggcaaagtagggcagggtgaacagtttaggactggctggtttgaataatttcagcctacagcggtggtaccttttgcctacagaggtggtaccttttgcctataggggtggtacctggccctgagatgattaaagtcgaggaggcgtggctctggattggttaatttgcatatcaaaagctttctcctggctgagcactggccagctcagaattgtctagctcagggcagtctctccctagccagagaggtttttttaagatgtcaaaacatcataatatacagaaaatttaaaaataattacaatacaatacagtgaacattcttgtggattccagtggaagatttttttaattattaacaaatatttggtgaaagcccactgtgtgctaggccctgttctaagcattagagatacagccatcagtagaacatattttaaaagccctagcacttacagagtttccattgtaaaggggaagacaatgcataagacaagtaagtccaatgtatatgctttctagggctaagtgctaagcagaggaaaaagaaaacagagaacagccaacagacatgtgagggggtcgacgtggtatgaaaggtggcagggaaaggtctcatcaaggaggtgacatttgagcaaagccctgaaagtctttataaataaatatgtacttaaagaacattataaagtattaagaataaatatgttagatcatcttacctaataagacatgctgtaaagaaaataagaaaatgtaatggaatgaagagcatacctattaagatttttttggctgcaggtaacatgactgaaagaatggggcagacagcgctttggacaagttgggcaggaaaggtctctctggggagacaacatgtggctgagatgtgaggaggttatattactagcaggagctatccaggcaagagaaagcagcaagtcaaaggctttgaggcaggaaaacaatcttgggataagcctgaggaaakaaagaagggcatgctggggcagggaagcaaggatcaaggaggctgtgaccttgcagattttattctacaygtgctgagaagccatgggagggtttgtttgtttttttgggttttgtttatttgtttgtttgtttttatactttaagttctgggatacatgtgcagaacatggaggtttgttacataggtatacacgtgccatggtggtttgctgcacccatcaacccatcacctatgttaggtatttctcctaatgctatccctcccctagccccccacmcracaggccrcggtgtgtgatgttgccctccctgygtccatgtgttctcaytgttcaactcccacttatgagtgagaacatgtggtatttggttttctgttcctgtgttagtttgctgagaatgatggtttccagcttcatccacgtccctgtaaaagacgtgaactcatccgtttttatggctgcatagtattccatggtgtatatgtgccacattttctttatccagtctatcattgatgggcatttgggttggttccaagtctttgctattgtgaatggtgccacaataaacagaygtgtgcatgtgtctttatagtagaatgatttataatcctttgggtatatacccagtaatgggattgctgggtcaaatggtatttcttgttctagatccttgaggaattaccacactgtcttccacaatggtcgaactaatttatgctcccaccaacaatgtaaaagcattcctatttttccacatcttctctataatctgttgtttcctgactttttaatgatcgccattctaactggcgtgagatggtatctcattctggttttgatttgcatttctctaatgaccagtgatgatgagctttatttcacgtttgttggccacataaatgtcttcttttgagaagtgtctgttcatatcctttgtccactttttgatggggttgtttgtttttttcttgtaaatttgtttaagttcattgtagattctggatattagctctttgtcagacaggtagattgcaaaaattttmtcccattctgtaggttgcctgttcactttgatgatagtttcttttgctgtgcagaagctctttagtttaattcgatcctatttgtcaattttggcttttgttaccattgcttttggtgtcttagtcatgaagtctttgcccatgcctgtatcctgaatggtattgcctagattttcttctcgggtttttatggttttaggccttacattgaagtctttaatttttgtataaggtataaggaaagggtccagtttcagttttctgcatatggctagccagttttcccaataccatttattaaataggkaatcctttccccattgcttgtttttgtcaggtttgttaaagatcagatggttgtagatgtgtgatgttatttctgaggcctctgttctgttccattggtctatatatctgttttggtaccagtacaatgctgttttggttactatagccttgtagtgtagtttgaagtcaggtagtgtgatgcctccaagctttgttctttttgcttaggattgtcttggctatatggctcttttttggttccatatgaaatttaaagtaggttttttctaatgctgtgaagaaagtcaattgtagcttgatggggatagcatttaatctataaattactttgggcastatggccattttcacgatattgattcttcctatccatgagcatggaatgtttttccatttgtttgtgtcctctctgatttccttgagcagtggtttgtagttctccttgaagaggtccttcacatcctttgtaagttgtattcctaggtgttgaattctctttgaagcaatcgtgaacgggagttcactcatgatttggctctctgcttgtctattattggtatataggaatgcttgtgatttttgcacattgattttgtatcctgagactttgctgaagttgcttatcagcttaaggagttttaggggtgagacgatggggttttctaaatatacaatcatgtcatctgcaaacagagacaatttgacttcctctctttctatttgaatacgctttatttctttctcttgcctgattaccctggccagaacttccaatactacgtcgaataggagtggtgagagagggcctccttgtgccaacagtctggttgttttttgtaaagtttgctttggttactgagtggaaaatggattatggaggcaaaagtagatgcaaaaagaatagaaggctattgcaagtgtacacaagagatgctggtggcttggactgcgttcacggccatggagatgagggaagtgggcagttggtggagctgaaaggacttgaggatggattagatgtaaaaacatcagaggaagaggactcaaggctgacccctgagtttttggttcggccagctgagtggaggataatgccagttactgaccaggaagagcaagtctggagtgatgcagaagtcaagagttcaagagtttgctgttggtcttattaagtgtgtgatgcctatgagacattcaggtggacatgtcaagtagaccattggattcacagagcctggaacttggaggaaaagccagggcaggatatcaaaatatgccaggaagtaaagctccaacagctctgcctagaggtcaagattgtcaaccctgctgggaaatggtagattcagagtgcagaaattttccagacagaggagatgctgacagcacccctatggagaaggtccatgcagacatttgtacaggacacacacaggaactaactcagctgtagataaaacaagtgaattttgttctgaactgaagatggtgaccacttgagatccagatgctcagtatcttcttatatctccattaaaaagtaattaatatattttttattaattcgattttaattagatttgtgaaaaattgattcaaataaattcctcttgtccatggtacagaccagctttagcagacagcaactgtatgatttttataaattartttggtcagtaattctctgaaattgctaaatcattttgctattaagtaagagagagtgtgtttgttaccaaaaagatcatgcctattcaaataagtagtgttttttatcactagtattaagtcatttcattaagagaagcatattaactagasagagaaatggtttatgcaaatgctaatttaattatggcaaaaatgttttataccttagaagttttccttatatgtaatattaattgtgagtaccaaagtctaagtaaatgaaatgctcttgaaacagtgtgattgttatatttacagtcagccctctgaatcctcatgttccatatccatggattcaaccaaccacagattgaaaatattcagaaaaaaaataaaaaataacacttcaacaattaaaataatacgaataaaaatgatacaatataacaactatttacatagaagttacattgtattgggtataataagtaatctagtgatgatttaaattatacaggaggatatggataggcaatatgcaaatactataccattttatatcaggaacctgagcatctgcagactgaggtattgcagtgcggcagtgatggtggtggtcttggaactaatctccagtatataactaaggatgactgtatatccttatgtcacagtagaaaattgagatttaggcttcaagcaatatcttttatctctatgctattatgcttcaatgtgttattgctattaatattaatgtggcatacagcaaaatttagccatggtaaattaaattttaatagagtaatttaaaggaaacttcaagttcatagtagttttaaaaataaaaattcaacagaagatgggttttataggaagaaattatgactttcattctttgttagcagattaaacaattactttggaatattccaacaaatttttaaaattttgcaacattaagtcatatataaactatagtatctctcatttctaaagtagcactgatattgtctttttcttcatatcaccaaaattaattttgatcaagttccctgaacattggacacaaaatattaaaatataaactcaattcactttattatctttcacaaaccattaatgcctttgaggcagaaaatgacacatctcataggaagattggttgggtgaattagttagagtcaacaaaaggctttgcgatgttaacatcctgtaacaaatattcagtttcagtttagcttgttttatctacagatgctamactgataaaaatcaatctgcagacttttcagtgcaagtgcctatcagttttattcaagagcttataaagaattatgtgccattttagtagtgatatttttccaattctgcaagttgtaaatgttaatacttcattaaaacaaagggccctggggcaccagagaggggacaaggcatacagattatactatctctctcccttttcagattgagtttaaagatgtttattccaatctcaataaagaaggattatcttggtaggcatttgtcctcccactaatgctacagagacctccagttccaggatctttttgggcactctgtaggttcaaaatgaagagagtgaaccacagatggtttacaatttacaatgtcttttcttaacaatttttcaactttataatggtgtgaaagtgatacatattcagtagaaactgtacttcagtatcatatccaataaattacatgagatattcaacattttattataaaataggctatatgctaggtaattttgcacaaatgtaggctgattaagttttctgagcacatttaatataggctctgctaagctatgatgttcagtaggttatctgtattaaatacattttgacttacgacgttttcagcttaccatgaggtgtaaacccgtcgaaagtcagtgaacatctgtagatggttttgaaaggactctcaggtctagaactctgtgttttgcaaagttatctatcaacattcatattctggggagttaactcactataacaaaactcacaaggagctgatacctatacagaagagccagtatatgaatatatgatagaaggccatgccagcatcatgatcagtgtgggtcattgacactggactttctctcctggtagataagactattctggagaacatttacagacttccaaagatagtgaatggtctggagcatatctccatttagcaagggtgaatttccttttctaatctagagatttttatcctaccaagttttctttctcataaatctgtccacttccatcactttaattctagttctcatcatcttgggtaatttatcctaatcagttcatattatcaagttatttcattgatgtcttattttgtgaaaaaaaatcccatagttgtcttattttgtcaatttgtgctgattcttaggtttgtttgtttgtttgttctttactttgggatatgggagggatgggtcattttcttactgtrccctcaaattatggagcgatactttattttgattctgcatacatctatatattaactacagcacacattttaacaacataaacatgtttaaatattctgagaaaaaaaaatatatgctacttttagcatctagccagaatcatttttcctcgaataataggcttcagattgtagcctcctaaatctgatgagatattgatgacattttacacattctcctctctcttcctgactccagtattttactctccattctcagtttccagctaagaatgttgattcttttttcgttaagaaaatagaaatatccagacaatttccacctgatgctgctactwtgctaacagccatcctctacctgtgccygtatgttctgccttccctcctgttagcacagatggactattctggtccctgttcctctctcacctgctgaaggacatccctctaatttttgtgtctccttctgtatcatcagattttccctctctactgagtctcttgcatctccttggaagcatgctgtactatgtcccatccttaaagaactccccttgtctgcacattaccctctgccagctggctcatttttctgctcccctttacagtgaaactcttcaaaagagttatctccacctccttccatctcatgttctcttgaacctgcagtactgtggtgctccctcctttttgctgctcctccctygttatcctgatctctaatgacctttaaacattggagttctttaggattcagttcttggaccgcttcttttctctgtctacactctcgactgcttctagcttcctagctttacataccatcttcatccttgatgattcccacacttaacttctcttactctgacctccctcctgaacttcagactcatatatgccccttcctggtcagtaactccatttggatatcttatagacattttaggtttaatatgtccaaaacaaatctcctgattctatactgcccccaaacttgcttttgccctttcttcccattctcaaggaatgacggttcatccagtaatcactgaagcccaaaccttgttcattcatggtttttctctctccccctttctcacaccctacatttagacaatcagcaaatctgttggctctgaccttcaaaatgtatctataatctgaccacttgttaccacttccattactgctaccttagtccaagccataaccatcccacacctggattcctgctggagtgttctgcctctcccagcttctcagtctgttctccatacggctgccaccatgatcccttcaatacatacatcagatcatttcaaaagcccccattgtcttcccgtctcactttgtgtactagaattgtcaatatcttgccaggccctactttacctcatggcctccattggtcttccctttcctcccctccactgcactggcctgtcctcgattcctcactcctacctccaagcctttgctcttgctcttttccctgcctagaatgctactccccaaggtatcttcataatttgctccctctcttctttcaggccctccccaattatcctgattaaattagcaactccttaccattcctacccagcactcctaagcctgctttgtttttatccacagcacttatggctgttagacacatagtacctttatttgtttattatatttgccacctttccaaaatggatgcaaagtagaagcaaaaagggctttgtcagttttgttcaatatgcctgccacatttgtagaagagtgcctctttcccagaaaacagttgttaaatgaacgaatgcatacacgaataaattaatgaaagaacgggaacttgggctggagacctgcctatataatgttagtgtgtaataggacgtacatctccatcagccccagcgtgtattagtcctgcatttatgacattctttcttgtctttagtaacaaactttacyttgtattattaaaatagtgtgttgattttctatcttttgttagttttttttatctcttgataaggagaaaaggctaacgtgtcttacatttcttttaaagcaygtccaaaagttaactttttatgaatawtttggrtaattacawacacagctagtcatgggacatttatccagtctggggacttcttctagtgtgaggatgatttggctgagaagaggagaagtaatgaggtgctacgtggagccatcgagacctaccaagaggtggccagcctacctgatgtccctgcagacctgctgaagctgagtttgaagcgtcgctcagacaggcaacaatttctaggtaagatgcaatcaaaggtaattcagtaggaaatggcatatgttttatcttgaagaagctgaagagtgtattcttctcttagaagaattacgtgggagaaaacctgagttttacaactgatttcaagtaatgtgtctgtcctaggctcaccatctctaaaactgaaattgtaatcctaatcttaatagaggcatgcctcacagatactgtgggtttggttccagaccatcagaataaagagagttacacaaattttttgatttcccagggtatctaaaagttgtatttatactatgtcatagtgtcttaagtgtgaaataacattatggyttaaaagacaatgtccaagccttaatttaaaaatatgttattgctaaaaaatgctaacgataatctgagccttcagtgagttgtaatccttttgctgatggagggtcttgcctcaatgttaatagccagtgactgatcagggtggtggttgctgaaggttggggtgactgaggcaatttcttaaaataaggcaacaatgaagtttgctgcattgattgactcttcctttcaggaaagatttatctgtagtttgaagtgctgtttgacagtattttgcctacagaacttttttcaaaattggagtcaatcctctcaaaccctgccactgccttatcaacaaagtttatggaatattctaaatcctttgttgccatttcaacaatgttcactgcatcttcaccaggagtacattcagtctcaagaaaccactttctttgctcatctgtaagaagcaactactcatctattaaagtttgatcatgagattgcagcaaatcagtcacayctttaggatccacttctaattctagttatcttgctatttccacatctgtagttacttcctccactgaagtcttgaacccctcaaagtcattaatgagggttggaagcaacttcctccccaaactcctgttagtttttatattgtgacatttaaataaaatgtatttattaaataatagaacttaaaagtctaaattactccttgatccatgaactgcagaatggatgttgtgttagcaggcatgagaacaccattcacctccttatacatctccatcagagttcttggtgactaggtgcttatcartgagcagtaatattttgaagggaatcttttttaaggactcaacagtgggcttaaaatattcaacaaaccatgctagatgtcctatcatccagactttgttttcccatttatagagcacaagtagagtagatttagcataatttttaagggccccaggtttttcaaaatcgtaagtgagcactggcttcaacttaaagtctccagctgcattagctcctaacaacacagtaggtgtatcctcaaaactttgaaagcaggcattgacttctcctctctcactatgaaagtcctgatggcatcttcttccaatagacagtgattttgtctacatagaaaatttgctgtttagtgtagatcacttcatcagtgatcttagctgtttagtgtagatcacttcatcaatgatcttagctagatcttctggaaacttgctacagcttctacattagcacttgctacttcatcttacacttttatcttatggagatgttttcttcccttaaatttcatgaacaaatctctgctagctctcttctccctctttcttcccattttatgatagcttgtataatttgcctaaggaatcatagctaatagattaataggtctggaataaaaaactcttcctgtgatrccaaattcttttcttccttaactatagcaaaatgattcatggaggttgaaattatctgtggaaattttgtataaatgaataatagctgtttctggtactctaaaaaaaatttactggtaagatttgaccctatatcaaggaaaatgctagaaaaaaaaacatgaagtaaatttgcaaatactttgaaaagaacatcatatcatatatcatcagatttaggaggctacaatctaaagactatcatttgaggaaaaatgataccagctagatgctaaaagtagcatacataatatagaacatcatataccatcctctggactgacccaggttcccagtaccaaaggcaagtaagactagctgttagctaacttcacgataaccaggcttacaattctctycccataacagatcatcagtcaacatggagggaaggagctaagctatgagtcactgccaaggcaggtgctcggctggcaagatagttacatggacagattattaatgtcacttaggggaggctcctatagattagagtcaaggcccaatggaccctcctatcagttttcygaggattagaatgaagaggagttgtatcacttttgtagataaataaaataggactaaagtccatgtgatgattaaaaatgataagaaatggtcagttagactaatattcatagggaccagtgcagcagaacaaaaacrtgcagcacaaattcagcacagaaaaggcagggccgggactccagagaggcaatgcgggcactcgccatggacgcagaatcagcattactgcccggacgcagtggctcacgcctgtaatcccagcactttgggaagccaagatgggcagatcacctgaggtcaggagttccagacctgcctggccaacatggtgaaacctggtctctactgaaaatacaaaaattagccgggcatagtggcgggcacctgtaatcccagctactcaagaggctgaggcaggagaatcacttgaacccggaaggcagagattgcagtgagccgagatcatgccactgcactccagcctgggcgacagagcaagactccatctcaaaaaaaaaaaaaaaaaaagaatcagcattactgagttttcctcttgcctcagtctccactatggctctgcttagcactgtttagtgattctgtcactaaagtgttaacattttcttcatcatgaatgttttacattaatattgattttttaaaaggatgcattaaactagccttcacatcaaaattatgaacttttttggcatcctctgaaatctaactctgagtgcctctctggcctcaccctgtcctcggccctgggaaggtgactgcctcttccacagcaatccatcagcatttgaatgtagtcctctcagaatgtccttgagaataaagcaagttcactcraggaggctctgaggcaaatggagacagaagattttagtgaaaatgacatggtggtgaagttggtcacaacacaacagggttcccagatgcagagtggaagggatggggagcagatggctgcaaggaggagtttgtgtccatgcttttgttgtggataataggagatttctagaagaaagtgtgagcctaggtgggcagatagggggaaggaaaggtatagaaaaggwagcccagatttgttagtgaggaaatgactagggttctggttggaatatgattggctggtaatggggcataggccgtcggatgagttggtgatgctttatggcagatggtttggcagtggaatatacagctgctttagcgtactgacactsccatcactctcctagattgtgggcaactaagccctttagataattcatggcttttttcgttgatgctagtcctctttttgcacatgttcttttatacagataattgaagctgggttttttcatgattcatgcgtgcaaagtatgcctttgtccacgagagggccccataatactggatgatgtatcatttgctccatgactaggtcattacctagagatgagtacacttgtcattcataggggatgtgtcagcagttaggtactgtcctatgtactttggtgccttttcgaattgcatacagggtgctagaccctgaagttagttaagactttttattgcttatcccctattcataaagttaataaaccaaaaagatttcagcagaactttttttttttaacgaggaattgttaactaagtttttcttgagaaggaayttaacataaaatggtaaacattgctgaatgtaaaaaatgagaatgtctttagatgtttataatcaataccatattcagtatctacttatggcagttattaataccattgcaactacattatgaaatcctactaggtacttagtaaaccactaataaagccagatttgagctggttctcaggctctggtgaatagtctstcatgacttacattctcaatacaaaagtgtacataatctgtttttatttctattttttttaaattcccacctactcaggtcatatgagaggttccctgcttaccctgcagagattagttcaactatttcccaatgatacttccttaaaaaatgaccttggcgtgggatacctcttgatargagataatgacaatgcaaagaaagtttatgaagaggtaagcatcaatcttgtattaactacrtcaaattaagttctaaggctatttgcaaattacatttattatacccagtctctstttattttaaattaagttaaaaagcatgtaagtattattatagttaacatattctaaactaygttttaacattgcttttcttcctagatcagaagatttttaaatcttagttaacacttagtacwttaaagccttcaacttataattgtgattcttttaaaacttcatatttatctttccatacatagtctttctaaaattgttcttcatgacaggaagaagaatttaagttcctgtgaatgttacacacacacacacacacacacacacasasacacactttcctttttttttttttttttttggcagaagtatggtctagagagaggctatatagaacaggggcctttcaagcatgtgacataaattacttttcagcagggcactgactcttcaaatcctctggcaaggatacctttcaaaggatttctactttataacagatgttgatagataacctctaagtcacaagtaactagaaaatctagagaaatgtgacttctttaggcagtggaggaattcatttggtacagaatgaacaggatgcccaatgaattttgaagatggagaaagttagcgcctctgtaaaagaaagatgaacatgtttacttgttattctttaatttaggccctttgatcaatggttttcaagctggtgaagtctacatcaatatgctaccactcagtgatagtatgatttctgctacagttttgttttgcttttgtttttgtttttgacacgtggtctcactctgttgcccagactggagtgtaatgacatgatatagctcacctcaacatccatgtcccggactcaagcaatcctcctgcttcagcctcttaagtagctgggactacaggcacatgccaccatgcccagctaaattttaaaaaattctttagtgatggtgaggtcttcctatgatatccaggctggattcaaattcctggccacaagtgaccctcctgcctcaggcctcccaaatagctgggattacaggcacaagtcatctcaccctactccttttacagtattttttaaatgccatcaagaacagcagtttcatactctggtagggactgggtctatcctcaaagcggtactttcctctgtgtattgctattattgtgtaatgaaaatcattgaattgtgaagcagttgtctttttacctttctcataatttttatattttctgagagaacagaaataagacctttgcttttataacatcactaatagctacacagggtggattgaacctttaatgttgacaatgtgtgccatttactaaagacctattccaggtcataaattaattccatgtggaacattgcatttgttaatggccaacacataacactcaatgccctgtcttacagagtatggttaagagaagcatcatatacctcagtgaatcagggtctgtgaatgtaagaattgtgaagctataacaaacatatccattagtttgtcactgtcagaggccacaaaaatggaacttgtagaattcctaacttccttcctccctccctccctccctccctccctcccttccttccttccttccttccttccttccttccttccttccttccttccttccttccttcctcccttccttccttctttctttcttccgtccctccctccctccctccctccctacctaccttcctgcctccctccttccttccttctttccatcaaacaaacaaactaactgactgactgcatgcatgcacgtctgaagggatggaacgaactaactacttacttatctctctaacagtctatggatccgtccttccttactttcttccttcctgcctgccatacatccatccatctgtctctctatcaaacatacatataagaaattacttccttcctcacgacctaacannnnnnnnnnnnnnnnnnnntcccttccctctctcccttccttcgttccttccttcttcccttccttcccttactcctcattcccttccttccttgtagaattcttccctattttctttcttctgtccctctacccctccctctctcgcttcctaccttcctgcaccctttcctccttctttctttccatctaaaaaacattctgaagtgttgactgggtgcaagcacgtttgaggttagggcaggatctgacagcatactggtttctctaatacactgtggatttgtccttcctcacctttttaaaacctcccttcaggatattcatccctttacctgacgctaaatctcagatatgtgaaacattttacttcatcccgaaaaataaaatttacctgttgtttatacattttatatcataatctcatctgaatatgcataataggatgcagaaagtctaaaatataaggatattattcaattgaatgagtttttttttwaaagcatgaatagactgaaaatatgtgtgggggtcgccttttttccggtcctctcacttttaagttaataagctattatctaatggagtctctttcattaaccaaggtttttcttgatatgtttatgttaaagatcatttttagaaaacagacattgtaattttatatttttcttcatgttaatttttacttttgagtacatttataaaaatcattgatatttttatttttccagctttttgctgcttttagttgcaacaaagaaactggctttaaaatggtgtgacatcatttgctccagtctgtggctttttgcggcccctcctgggattctcttgcaagttggcaacattagcagctgcccaggtgttacagtggggagtttcatgccactcctgactcacccgccactgctcacgtatacccattcactcagccaacacacatctattaaaacccatacacactagctagagaaacagtagttcatgaaacacacgcagaatgtgcccacatgaagtttataatctggtaccaaatcacgaatttgtgttcattttaacttctgattaactttcaaatcccttccctttgtaaccaaagcacccgtcatctcttgcctgagcagggacaggtttatcctgtcctagcttgctccccsccccaaccctcaccaacactaaaacacaaccctgatcatctccctcggctttaaatcttctgtggttctcatttcctgcagcagtggtcttcaaacatgcttgatggcggcccttccagactaaaatgttcaagcaaatgcctgagatatgtttatgtacttatatgttatgtgtacakgtatgtacccacataatattatgtatatatatatgcactaatatacatgtgcattacaaaaggtacataccccaaaacaatttttaagatgatgtcaaatataaaattctatttaactgccagaaaatcttttaactcttgctgaaaaattaatatttatgattttatgattatataactttttaaaatcccaggaatgtatcacgcaaagagtttgtactggggatagaaatgtcggctgtatgaggttgtggttgtttttgtctgtgctttgtgtttgtgtatggatgtgtgtgttttatagagagagagaaagagagagacaatctgtctaatattacatttggcccttgaacaacacaggggttagggatgctaacctcctgggcagttgaaaatccatgtgcacattttgactccccaaaaacttaactactgatagtctgctgttgaccagaagccaccgggtagcataaacagtcgattaacgcatattttgtatatgtactatatgttatattcttataatgaagtaagctagagaaaagaacatgttattttaaaaagcatataattggattatttgtaacacaaaggataaatgtctgaggggctggataccccatcttccatgatgtaattagtatgcatagtatgcctgtatcaaaatatctcatgtaccccataaatacatacacctactatgtacctacaaaaattaaaaaattagaaaaagaaactgtaaaagccataaggaagagaaaatatatttgctattcattaagaggaagtggatgattaaagtttgcatcctcactgttttcaccttaactaggccgaggaagaggaggaggatgagggggagttggtcttgtctcaggggcagcagaggcggaagataatccatgcatttcaaaccaatgttgttcaaagggcaactgtagcctcaatctgggttttttagaaatctcataaaaccacttgtcattttctgagggtttgttgattacaactagataatacaacctgcatgtccattacacattcgcatataaactgcagtgagcatggtacccacgcacaaagaagcaagcagggagggcagcactgtcagctgccctggggcctgagccctgaacctcgcctcctgacagtgtttttcctgaatgggacacatggctgtccaccgtgcagatcacagtagagccacagagcttgtttcacactatttgagagacagatacaagtagaagtgtatgtaatttttttctactccccaggagattaccttgtacttgatactaaacaggaccctttgtgatttaatttgacttctgccttttctccagtctcttctgctatcaccttttgttcataatttaacaacattctcttttgcttttcctggcccactatccctttctactcactttctaatataccttgaatgccttttcctccatcatcccacacttccttttcctggtgaactcctatttatccctaaatacctttcagagcttggccccacccacactcatcctagagtgagccaggtgcccctcttatataacccctgcatgcttcrtgcctatctatagctacatttaccatcttgcattgtctacttctaaatttgtctacttctaaatctgtctccctcacttgagtgagagccccctgagaaaagagagtatatctcatttatctttctatgcccagggcctggaagagttctgtgtgttctaagatgtctagtaaatcaataaatttgttaattacttgagataatggctgtgtgcctgcagtaggcagaaatgtcatctgtgtagctgtaataattatrataatccctccatggttatgctggcagaatcatcatctrtgtcaatttagttcaatgccagaggtatttattgagctcctgctcaatgtctagcttgggaacagtactgtggaaactgcagagaagcaggatctgggctttcagaggtctagttagggaggaaagcccagcatgtactcatctgagcatttagtacaggtttctcgggcacctgaatgctatgctatgcataacaggcagtggggatgagcaatgagcaaaacagacaaaatccctgtagagcttgcatcttagtgggagaaataaaagtatactaggtcagacggtgataagtgctatgaagaaaagtgagacaaggtaaagaagttggagagtgactagggatggagggggttcagttttagtaatgcgggtaatggtcaggggtaggcttcacggaggtaagggagcttgctgtggggatgtctggcggaagagtctgagccagagggatactgtgaatgcaaagaccctgaggcaggggtatctttggcttgctgtggagcagcaagaagtccaacatgcctcagaggcttggctgggaggggcaggggcaggagaggaggccagagcaatggagaggcccagccaagggaggccttgggggtggttccaggaaccctatcttgcactcactctgagtgcaatgcagcagaggagggttgagatctgacctaggatttagcaagcggagagtggactacacagggtcagggccatgtgtgcagaggatctgcagtgaggaggctcctgtaagaagatatagagagatgatgagacacctctcttgggtcagggtagcagtggtgaaggaagtgacacatggtatgtttctgaatatattttgaaggtagtgttggccagatttgctaatcgatgaggttcaggacaagatgcaagctgaaaatgctacagcatctgcagtgtgtgttgtgtgggccccccgagggcctggtgtcccctgcgtgtacacttgatccttctgtgtaaccccattgtagtcctrctgtggctgtgacttccctttttctactcagtctcaaggatggagagaagagatgggagatgcatctttccctacatgcacatgcaccgactcaaaccttctccatccttctcttttgttccataaattagtttgtctaagtagcttttcaagttgaatgttgttgttctggtttctcactattaatatttaatttagaggcactttgcataatttatctttaaatcataatgaatgcatataataataaacagtgatgtgatttatatgaaatatttacctgggttttatcacagaatattggatttgctcaccactttatcttcagggcttaaaatggtctgggcactcaagaagttttctgttgaatgaatggattgtgatgtattacaaatgcaaatctaaattttctcttaattaaggcaatgtataaagcttgtatatgaagtgatgtctaataaccattcagaattgtcttcaagtatagcaaatttaaagccattttcccttgatcactaaaaaatattgaagtcatatcaattgagagatattttgctgatttgcattgttaaagtgatgctttaacggttattgccttttcattcatttcttcattcttgaagaaccattgtgtaaatgtgcaaagcatattgagttgagaggaaatggagccatttaagcttaatgatattgccatgagacaaagtactatggtgttttcagctgtaacatcataatccaatccaagtacaacaaagctaattaaaactggttttgacagtcatctgtagaattttctaagcaatcacctatgttttctttgagttatgttctgtgttttctttgagtttaggtgctgagtgtgacacctaatgatggctttgctaaagtccattatggcttcatcctgaaggcacagaacaaaattgctgagagcatcccatatttaaaggtaatgctcactgcttctcctctcctttcatctttcaagtccttcgagttattgggacacacttgcttattccttgtagattgattgcatgcactgctgagtattttcatcctcaggatgtccaccctcagaccatgacattcataagcagcgtgggcctccactgtaaccaaaagtgtcagatgtcaggataccaaccacttgagcagagatgatttggaaaatattttattttaaaatttataaaactgaagttgttattagtttttaaataaatggcaaaggcagacaaaattagtgatactttaaatatttttaaataaagacaataggccgggtgtggtggctcatgcctgtaatcccagcactttgggtggccaaggtgggtggtcacctgaggtcaggagttcgagaccagcctggccaacatggtgaatccctgtctctactaaaaatacaaaaatgagcctggtgtggtggtgtgcacctgtaatcccagctacttgggaggctgaagcatgagaatcacttgaacccaggagacgttggagaagtctggagaacccaggagaaccctggagaagttgcacaccagcctgggcaacagagtgaaactgtgtctcaaaaaattaataaataaataaataaaatatrtatatacacatatgtattaaatatagacaatgcattatatgttccttttacaagttaattatatatttactgtactcagaatagtactcttaactacccacacaaagttaggtaacaaatactggctgaaaaggtcattgctcaaaatattcaaattaaaatatgccttttttctcatatctaattaaatcctcatcaattcagcagaatcacaggtggtgtagaccagggcttcccagtagaattttctgctgtgggccaggtgcagtggctcccacctgtaagcccaacacttttggagaccaaggtgggagaatcacttgaggataagagtttgagaccagcctaggcaacctagtgagattcccatctctacagaaaattctaaaaatcaaccagatgtggtggcacatgcctgtggtcccagctactcaggcccaggaggtcgaggctgcattgagctgtgaatgcattactgccctccagcgtgagcgacagactgagaccctgtctctaaaaaatgtgtataatattaaaaaaacaaacaaacaaaaaaaacagagcaagacccagtctctaaaaaaaaagaattttctactgtgatggaaatgttttttatctgtgttctccaatatgatggccactggccacatgtggccattgagcacctgaaatgtggccactgggactgaggaagtgaatttttcattttattttaatttagcagtaatgtgtggctagcagctaccatattggacatagctaattagatagctgtaggctttttttttaagtatcaatatattccacttttatgatctctttctttcacatgacttaaatcagagatcccaaatagtaacccactgattgcaaatagcttgcatgttttatttggctggcatggttctattaaaaaccattttaattgcttgccttatttgagaatctgagcatttttatataattatgcagacttctagtttctcttgaaacgtcatatctggctcacttccctgcacacagacaagcagtgatccccccttgggatggggctgtccctggacccctgtcaagcacttcatatttcctgccagggccctgtgggcatgtgggtttctgtgatttaaagtgtctccttacatttcctttgacataggatggcttactggtactctgcctgcttcagagatagggaaagcaagagctggcctggtcagttatcaagcaaggacacttgagtgttggtcaattagaagccctcgccacagctcccttcctctcctgagtgatgatgcctttcccattctatcgtgcagcttgctcatttccaacattatgtaaatacaatttcttcctagtgaaagataataggcttcttgtgaagaggcctcaaggatgcagatttttagaaagaagtccttgacatttacatatttttaacttttgtccttctgcttttctaaacgcattctgttgctttaatattttctcttttctctttgtggggacgggaatggggttcatcaatctcaatttcagtccttgtgtgagaaatcagagaattaggtaaatgttttagaatagggatttgtttaataaaaattacatttttaaagattcaaattggctttaattctcctgtatgttttgtaaaaaaaaaaaaaatcattaaaaggtaaggacacatttgttttgaatggaaagaaataatgctcgcagttggactgccatcacttcaaacatgagcagttaaacattttggtttaggaataaaaagcctctagatgacatatggtcagatttggagagcaaaataaatgtaagagctatccagccagagaaattcttcaaaatattgaaatatgattgttcccacacagaaggtacacaaagtatcatactaattttgtgggccattccacagtgaattaatgatgaatgcattgttaaatttagctttatgacctccttttgttttggcattgcaaatgttgaccagtaacctcattccmaaagtttaatatggagatrtatttttctggtttttaggttttcatacgatgtgccataagaaaagctatgtaaatcaattaatggaatctggtatttaattattttacccatactaacactgtcctttctacaggaaggaatagaatccggagatcctggcactgatgatgggagattttatttccacctgggggatgccatgcagagggttgggaacaaagaggtaatgggtrtatgaatttctgattctctctaacagaggatggagttgggagaataattatttctaggaaagttagaattcaaaaaatattttgagtgtgaactttcraaagcagtgatataaactatttagttacttaaactatctttggaacaacccaacaactccagcttaaccctttaaagaatttttgggatttggcttttatagtttctttcaagaaatcagctaagtaatcacaaaagcaatctctaagttggtacatgtctgtgtatgtttttgtctgtgtgtatctgtgtgtgtgtgtctgtgtgtgtacagagagatagaaattgccttggaaaagtattttttaaattttgaaatgaagagatgtcactgaaataatttaaatttttagaaatattttaacagtttgactagattcatttttgttttattttggacttttaaaagtagttctttttagaatgaagtctttatcagctgattcctaatcacacagatcctaatggttagttgtgtaacttatcctctgaaatatttaataccaagtttaagacgaacattgtggtgatagtaatgatagggattgacacaaaaaatgtagtagctaaaaaagttccatgtttcctttgtaatggttacctttttctgagtacagtgtctgcttctataaccataacattgtctcattaatcatgacatcgcatgctataaatttcaaaactctgtcacagtctaccatgatttacgatttatgcagccctgctggatggcaaagccctcctttcctgtcctgctttattgcaggggtgagagctgggctctccttagagtcagtggataaaagggtaaagtgagacactgaatctttgtaaccattgcatcccatgtatgtaataaagtgacatctaaggataatacagcttcaggtttctaaaattagtaagaacatggaatcatctggggaattgagggttcagagaagtgaaggggtttgtgataacgtaattgtctgctaggaacatgaaccaatctggaggtactagaggttcagataattgacaatttttgatttatacatgtctatttatctgtacctttccccctctaacctaccagtcaactgaaatggaatgagatattagaattaaagagaaagatgggagaagaaattgctgattagtagtcctttttgcatcgcatttttcttttagatgtaatcactcagaactcctttgaatgagagggataagaaagattttgctacaacatctaacactggataaatgttcatgtctgactactgtaaatgtaatcatcactaattaatttatctttgaacatttcagagtccagggcaaagacagatgaaagaagcctatgatttatctcacatcttagatgaaaacagccgttacttcaagggcaaaaagttcattactatacacttgttaagggcttgggatttgaacgtatgggactgttctaccaacttaattatcatgaatatgcaaagaacagcacagttcttgaatttaaaaagttcagaaggattcgttcttacaggagaacagaaacaaacctgtagaaactccatgttagtatattcccagcattaggtgttgagtctgacttggctgtcgtgctctgagtttgcatgtcaggaagtaaacacctttcacgtttttatgcctagagcactgctccaactctgaaagaggatggatctgcaaaaagcaaagccacagcctctgtgctgcagagactgacaagaaaatgggttgtgaggaaaatttttctaagtggtccgtttagtatgggcaggaagacgggggacaaaccatgagggtctgcagcaattcagatagcagttctcggtattcccataacttccaaatccacgttctagctagatttagtctccttctccaagtccccattctcatgtctacygccagctcagtgtcccacacgatggcacagagacaayttacttgtctttctctaaaccgtttttcctcctaggttccttctctcattcaatgatattcccgtcttcccaggatcaagatttgagtgagcttgagctcctccctctcctccttactccagtctagtcagggccagctatggagatctggytttctcatgtttttggcatccccctcaccctccctcttgctcagtcagtgctaactcctgtctttgtcaactgcgtcctcaatgatagctgtgagaacctggatgttgtttcttgcttggtctcagtttatttcaagccaccctatgctcaaaaagcctaccatgcaaaataacataacattctgtttgcacgcgatagcatttacaatccttaggcaagttgcagccagctcttctcaccagaagtgtgtctctcaggcctcactggacagtgggctccargcagaacataccccagctggggccacttatgacagcccattccacagatgtggcctgggcttttctgggatccagtcatctgacatactttctgtctctgtctctctctctctctctctctctttctcttatgtgtgtgtgtgtgtgtgtgtgtgtgtatgtacatgtgcataaaaaccatacatagcaacgattggaagaaagtagagacaacattgatataaaatayatttaacttcttaaatgtggcccaggggctcttactgcccctgtgtcccagggcctcctactgtctattttaatattcctaattgctgattagacaggaaaattgctgatcagacaggaaatagtagagaaattttcaggggattctaacttgatctttgattttatagcaattttttattgtaaagtagtttaggttttttttaaaaagcactctagctgaattcrttgggtcccctgtgtcacatattattaaaggtgatttttaaaaatttctgatatatcactttcacaattttgtttctcctaaaatttatatgacaggagagtgaaaaattgagtcctacttgatgcaggattacttactttgagtgtcagaaaagaccttatagatagtttaaacatgctgttgtaacttgcccagacatctagcatgtcgagggctaattaaaggccggaactaaaatctaaggcttccaactcttgaactacagctataatgtttgctgtttttatttttctacaataacttcttttctcactattctagcaatacactttatccttaaaatgaattgtgatgactcaaaaatggactgtcagatttttgaaaaaacaatctgttgtccttagtattattgttcacttttgccctgaaaagcataggaagtaaaatcctaaattttagttggacaaaaataaccacaatagtcaaattaatttcaaagatatatgctattttttaaaaaaattagataacaattagccattttaactttctagtttttaaaggaattctggctacaacttacatgtattgtaaggaaaatatttaagaatgatttgtatatgcattcttagtttcagatattaataaaaaagataactaaataagaaaatcatttttcatagtgtttgctaaatgatataaataggaggagagtagaataagttgccaggagccccaaatgctagttcagaagatttagcctttataaaccttagtttcaacatttgtaaaatggagatatttggggttattggaaaaatcaaatgagataacacattcaaagaaagtagtcaatgtaaagtgttactgaaaatatgaggtgatattgctatcccccttcagtctcctaatgagggaaaatttgaaaagttaacattttttacatctaaagtgtatctggtgatttacaaagaagatattcaagttactatgaaatgcttatttttatttatcaaaaatacatttgaattatctctgtaaaagtaatcattagatcaggtttgcagtagtggaggggataatattaagtgtaccattagaaagccttccattcaaaagacaatggaacatgcatggtgcaggaagtgggcagggctccttggagagcatatggtgagggcatcatttaaaggagccataaagagcgtcatgctccgtagccagctgtccctgaaaaggctagtcttggaggcaagtagtatcatgttgcagctagcctaaagccacacatgttatcccttatggcagaaaaaaatatatattatgaacaaaaattccttctttaaaaatctaaaatgggctatcactgtatttattgcccactcagaataatttttcccttctgtctacttaatttaatggagggtttgcactctgacgccttggkgtgaccttcttaaatgtggacatggaaagtacatgtgaaaagaagctgcttttattttagcattctgattcagtaaatgcaaatatctttgaagaaattattaaaatcataatctttttctaatggaaatagaaaatagaaaaggccctttggtgtcttatttattcattcaaaaaataagtgctcgactccctgctggacactcgagggagaccaaaatgtgtagggcatgaatccactatccagagagactgcagcctaagggggaaaagaaaatgtacatgttcattatacaaataggtcataatcagaaacccagtgaaataacaatattttcaccagatttcaacagatttgagtayctagcagyaagctctttatttaaatrtgtcaaagtaataccttatttttaatgttttcaattttaaaattaataaaaatgctctgttgaaggaacagtttggagcacattctttctgttccttcaggcatataagtggtatgagcttgggcacaagagaggacactttgcatctgtctggcaacgctcactctacaatgtgaatggactgaaagcacagccttggtggaccccaaaagaaacgggctacacagagttagtaaaggtaagtataacttagacatcatcctcaccagatctttgtctatttcctcctcaaaatcagaaaatgtttatcataaaaaggaatgtcagggaagagatagattttatttctagtgacatttgcaaaatataatggaaaaagaattgtcatctcattaaccaaaagtttcatttagatgatgaagggaatttgtgcggaacttaggagttctcaacctttttggccttaggaccctcttatactcttaaaaattattgactaccccaaggaatgtggcttacatctaccaatataatcattagacattaaaagtgaaagaaaattatatatatatttatgaattatttaaaaataataacctcataacatgtcagtataaataactttttaaaaaaattatattttcaaaacagaaaatgtagtgagaagattggaattgttttgtatttttacaaatctttttagagtctggattaatagacaacaggagaatcctcacatgtgcttcacacatgtacctgttagagctgtgatgtcctacctcatgtagcttctggaaaactctactgtgtgcccagaaaagaatgaaaagagcacataatatctttgtattattaagaaagtagttttgatcttgcagagcccctaaaagggtctagagaactctcagatgtccttgaaacacactttgagaaccactggccctgcaactatggagagaaaacgcagttataaatattgttagaaaatgctgtggcagaaaatgttgtagcatttggagaaactaagtgattctaaatagctataaaaataattggaaggttttatattagtaggttaaacctgaactttaacggtctctacttggtgactttggtagggactggtcagaagtttacttttgctttggtaagccccctcttcttagacagtcataaaatgagactcacagttaattaactcatagttycaatcatgttgttttctactcaaaatgtaaaaacttcatgtatcttacaggttagatggcttcagggttttgacctcagactctaattgctatttgtacatggtttatataagaaaatatattctgatgttcaaacaattgattttacatgtgcaagaagcagggatgaagagsaagagtgacaaaatattgataatgttagaatctggctgatggatatgtggaggtttgtcatactgttctttcttcctttaggtatatgttgaaatttttcataatttttcttttaagtaacatctaaaataaactgtatctataagacttacaagacttcactgattaatttggtctacttggggaaaagaggttttcatgtacttagattatgtcttacttgactgtgtttattctgtatgtcattataaaagcatactttataatcttcataatccaattgtaaaataggctgccattggttagcctttgaatattttatagctcagggaaccatggcatggtgacaattaatacagattgattttttaaagttccatatccagattagaaatagcacaagaacaacatcttccttgataggtcggctacatttagcactgtcgggtttttttgttttgttttgtttttgtcaaatttcaccctccctcagattggatcccatcgaactcttctgattctgctttactatcttttattcatgatctctttgtgagttcatttctctactgtaccttttgggatcctttcaaattcaaaacacggaaatgcaattcaaacctggcttaaacaacaagaaatgttactgattgacatagctggaagcctagcagtagggcagacttcggggcagtataatcaagggaagatgttcttggctctgcacttcctccttggtcagctttgtccttgtgctggctgactgcaggatggctgccagcagccactggaagagagggggagagagtgacattgctgagctaccaccccagccgtaaatggccttctggaaacctcctggcagaccctcttctattggtgggaaccatgtctcatgggcactcacagttacaagggagtctgaaacaccagatggctggcaacagtctgaggcagccagcttccaggaggagagagggtgtacctctctatcatctaaggaccagtaatctttcctttcagtcttattgagccaatttaagtcagatttccactctagatgaattactggcagggggatatgagattattcttaaaccaacagatcaamccctacagccagaaaaggattagtttcctctaaatcaaataaatggtttatctggaggaaggtggacgctcaaagtcagrcttttgttaagaagaaagaagcatgattgattgtgtgaaggcagtctactatgggctgacatggacccaaacattgttctttgctttcttttctctttttcttgccattcattttctaagaaatcttctccactgtggtttaactgctgtgaaaattctaccaaagctatgttccccaaatggacttctcactctttctattctatgttcagctctattaaaacattaacattcggtgtgaacattaactcaccacgtaaccccttggttaatatcgttttccagctttccagttttggtcagtgtcttagtagtccatttaagctgctgtaacaaaatgccataaactcggtggcttataaacaatagaaatttactttgaggaagtccaagactaaggtgttagcagattcagtgtctggtgaaggcctgcttcctggtttgtagatggtgctttcttgttgtgtcttcacatgatggaaaagagaaggcagctctctgaggctttttttataaggacaataatcttacttgcctaaatcacctcccaaaggccccacttcctaacaccatcacattartgattagatttcaacatatgaatttgggggacacaaacgttcagaccacagcagtcagtgattcagctttagtctgcctttatctcttaccactgccctttaccatcctcattccagacaaaattcttccaacagaccttcccatacggtagccctctttcctggaggactctttctttacctctttctgttttccttctctcatatatccttcacagccaattcctttttatccttcagatgttagagaaattgtcacttcttctaggaatatcagtcctttgcataaagccaaaagccctttatactttctttttaaatagcacactatattctaaagtctcttagttctctgagattgtgtcttctaagatgacagggaccatgtctctaatacatgatgggttctcaaaaattaggttcattgtatgaccttctataaactttcttttctctagttttttcataaatatgttagaagctccagggatttaaaaatgttactactgagcatttcttacatataagaagttgcaacagttggtatccttggtttttcctgaatgtgaggaaaattctcccttactgcactgcaccaggagaggaaggcctagagagaaagaaaattatctctacctgctattttaggagcaagggacaaaggtattcattttcttgaaattgttactgcttaagaaagaaggatatttagaatgttctcagttcctgatgaaacctcaagcatttaattgcttataaaacattgtgtaatgaggcagaacatcagaatggcagagggaatgtcttcataaatctacccctccacaaaagcactgagaaaaattgttaaaatcaacttctttagaactctgtacattagcaaagacatacaacaattaraggaatatttattgaaggaaaaagtgctgaacctgaataagaatagcagggtttgtggggtggtaattttaactgctcccaaccattcttccccagttccagggtagccttgaaaactggcaatctcaaaacactagagcagtgaaaaccatagctttccaggcactagtggggccacatcacatttttagtacctcacaaatttccatacccagagcattgtcaccattttaaacctctctctttctacctggaaagctgcattctcaggacattgttgttatttgtcctcacttgcaagaaaagctctattcccaggctattagtcaaaacaattattggcaggtattttttttaacattacaagtgcccagagcaactacaggtaaggctacaggcaatagagatttcacaaaattaatccagaaagtcagtaaacaaacaaatagtgacaacgataacaaaaatgaacaacaacraattttatgagagggaccgaactgatttccagaattgccacattgtattatctaaaaactgtccagtttcaacaaaaattatatgacacacaaagaaataggaaagtatatacatgcacagaaaagcatgcagtcaatagaaactgcctgtgaggggccctgatgctgaacttactaaacaaaggcttcaagtcagctatcgtcagtatgttttaataactaaagaaaactatgtctaaagacttaaaagaaattattacaatgacgtctccccaaatagagaattccaatgaagagacagaaattataaaaaagaactaaacagataatctggagtcataaagtacaatatcttaagttaaaaaactcactaggggggctcaacaccagatttaagctggtaaaagaaataatcaacaaatttggaaataggttctttaagattatccatgctaaggaacagaagaaaaagagaatgaagaaaacaacctatggagcacgatcaagtgtaccagcatatgcataatggaatcctcaggggaagaaagagaggtggcagaaggactgtttgaaaaaataatggccagaaatcctccagattagataaaaagcattaatctacacatctgagaagctcaatgaattataaggaggataaactcagaaacatacctagacacatcacagtcaaattgccaaatttaaaatttattttcactttcattttattttttcaaattctaatctcaaattgacaatcaaataaaatgagattcttgaaagcacacagagaaagaggacttattgcacaaaaggaaccttccttttaagatgaacagccaacttgtcatcagaaaccatagaggagagaaggcaatgaatgacattcaaatactgaaaggaaaagactgccaaccaagaattctatatctagcaaaattaagacatttccagatatataaaaactgggagaagttaatgctagccaatatttcttgctctacaatagatattaaaggcagttctttagattgacataaaaagataccagatggtaatacaaatccacatgaagaaaaaaaaagagcatcactaaagatagtgggtaaacataaaagggataatatatgtgtttttattagttttttcttctatcttattccaaaaccaatgcataaagcaataaatgtaatatgtattgtttgtggacttatagcatagaaagatgtaatttgtatgataatagtgcaaaggaggaaggggaaaagatttatgttggagcaaaatttctgtatgcccttgaaattatgttagcaataaattgaaattgattgttttaattaaaggtattaattctagtgcccagggcaaccactaagaaaataactcaaaaaagtagggtaaaattaacaacaaggtaattaaatggcacactagtaaatatctatctgttgtaaaggaaggcagtaatggaggaacagaggaacaacaacagcaacaaaaaggacattaaaaatgaataacaagatggcagactttatcagcaattacattaaatgtaaggacatgaaatactgcaatcaaaaagtacagattaacaaaatagatttttaaaaagtgatccaattcaggtccacatgaaacattaaccaggaaagactatacactaggccataaaacaagccccaacaaatttagaagcactgaaatcatacaaagcatgtttactgaccacaaaggaatgaaattaggaaccatcaactaaaagctctccttgtcctcaaaatctgtttgcttgccagtaccccactactgctgtcaaagttactgacttctgcttatatatcttgtgtccttttcctttttgatatcaagtattttattaaaattcttatttccttgggcttttttctttcagccctgcctgtcttaaactctgctttatttaagaagaaaagcaagatcagagtgtgaatcatagaattctcagtgcatggaatctcagtgtgtgtggcatctcatggttacaactccatgctgtgtgattgtactttgagaactatatttgcaggaatgttaatttatgacttaaaaaaaaagtaacgtcaggatgaccacttgacagtagtgactgtgacattaagagagctgctgtgtgcagaaacccagagttcattgaccgtttagttgacagaccctggaacatcaagatattcttctattgtaattttcaaattacagaattgaatattatgagtcatggaacatcacccaagtattgacgtcttaaagtggaaaccctctagatttrgtagctgcaacatttggccaaaatacttttagaataattacccagattttggcccttgagtgacttttaactaccatgaatagggcatttccctttttttttagacggagtctcactctgttgcccaggctggagtgcagtggcgcaatctcagctcgctgcaagctccgcctcgcgggttcacgctattctcctgccttagcctcccaagtagctgggactacaggtgcccaccaccatgcccggctaattttttttttaatatgaattatatctttactcttataaaagtcatgttgaataaataaattctatcttttaaaatacaaaaccattatattgccttaactctaattttttgtattttttagtagagacggggtttccccttgttaaccaggatggtctcgatctcctgacctcgtgatccgcccacctcggccttccaaagtgctgggattacaggtgtgagccaccgtgcccggcctctcatttccctttcttaatttttttttcaattcttatttttaaaattataaagatggcgtttcaccatgatgcccaggctggtttagaactcctgagctcaagcgatccacccacctccgcctcctaaagtgctaggattacaggcatgaaccactgcgcctggcctgatagcacattttcattcaacttacttcttgctctacattacagtgagagatagagtgcagttttcctgaaggcaggggacagtgctcagtaaaatgcatcatatgtgttttcccctttggttgaatttctgtatgcccktgaaattatgttagcattaaactgaaatagtccattcttgcatcgctataaagaaatacctgagactggtattagtccattcttgcattgctataaagaaatacctgagactgggtagtttataaagaaaaaaggtttaattggctcacggttctgcaggctgtataggaagcatggtggcatctgcttctagggaggccacaggaagctttcaatcacaggacgcttacatggcagcatgaacaggagcaagagagctggggcaggtgaggtgttacatacatgtaaacgaccagatctccaagaactcattcactatcacgaggacagtaccaagagcgatggtactgaaccgttgatgagaaatcacccccatggtccaatctcctcccaccaggccccacctctaacactgaggattacaattaacatgagattatgagatttggatggggacatacatccaaacaatatcacccctcattgtgtaaatataatttggcagctctagcactaggagtgtggagaggctattcaactcaaggaaaacattagtgaaaaatattccagtagagttttctcttttcagcttattttccttaaaattgagtaggttgttgcccaaatcacaactatcaaagcaccaagtgccttgggcttatttaacatagaaattgaaacaaaaatggattaaaatctttgctagggtaaaaatagaaaagatgtcctatagttagagaaaagccattaaagcttaagagttttgctcttcccttttcgggattaactatttgatccacactaatttagatgtaaacacacattcatagaaaacactatagtaacattgaaaataaacaaccaatagcaactcaaaactgttagagtaggtagctcgtcaggcataagcagcgcaggagagggacagacacacacacacacacacacacacacacacacacacacacacaccccagaagtgttaggtgaccatcacatgatggtcaggcggttgttaacttttctctaaagtaataattggtcacagccggcaccagggaaaggcagtctcctaatagatagaaaacacctgaaactgatcagcagcttcccagtaaggtctcaggagtggggagaagtaacgcaagatcctggaagtataaccccaagccgagaggtcaagcagggcatttgatctctcagcctgcttggccctcatccaggtgtgctttccttccttcctttctttactgttctaaagctttttaacaaactttcactcctgctctaaaatttgcctcggtctctcctgctttatgcccctcagtcgaattcatccttctgaggaggaaagaattgaggttgctgcagacccatacagaaaactaccgctgataacaaaaactataattttaaatatatatatattttgagatggagtctcactctgtcgcccagtctggggtgcagtggagtgatcttggttcactgcaacctccgccctccgggttcaagcgattctcatgcctctacctcccaagtggctgggattacaggcgcctgccaccacgcctggctaatttttgtatttttagtagagacgggtttcaccatgttggccaagctggtctcaaactccggacctcaggtgatccgtctaccttggcctcctaaagtgctggaattacaggcatgagccaccacacctggcctaaaatatattttttgtatttgtttctcctgctgtctaactctgcattcatcactgagaaaaaggaaaactgcattcttttcccagtttttcagcgcagctgcttggatataaacacatccaaacagcatcataaataagttttgtgatccaaaatagcatcatatataagtttgcctttcttcatattgtagttttattacagctggaagagtgcccagtaatattttgccagtgatgtgacatagtgcattggaatgattgattagaatagcactctgtcactttccttcacactgtggcttttattaattaagaaatccattgtgtatgaatgacttcgcctagacaaaaataagacttacacagcactaaattagtggttcagcatttctttctttgtaattaaatacttgaatgttttcactggactgcttttgaaatgaaataatttgagaaagcaaaaatgtcagatttatagtggaattaagctgtaaattaagaggattaataatttatataatttacttttatgtaaaagtaaatatagtatcaagaagtactgaaagcaatttcttaagattaacataatagcttagtcttatctttctaaatcaaactttaaactgtttgggtttcgatgacactttcactgaagatgtcaacaaaacaacaattggagtgtggagtttgataattacatgatttaacggtgaactttttaaaagggctccataattagaaacagatttgttttgctgtcagctctgacactttgggcaagtccttttaccyatctgagcctgtttttttgttgttttttgtttttttatctctaaattcaaaataattacctcagctcctcttctcccgtgacgttttggtaaggcttaaaacacaaaacaaaatgaagccttccatcatggatgttcctgtgtgctatttagatatgagcccttaataagagtccacacggctgaggctatagggtggcctatgatgccaattatggcagcagagcaaaggaacacagtgttttatattctttgagttatttcatacaaagaggctttttttttctgaaagcaaaatcagtgagtttttattatttgtcaatgtgggagaaaaaaaaagacctacaaattggctttctctctgaccctctttgggaacttacagcacaacgtttgatatttcagaataattgcaaactatacctctaggttggtactccatttggggttctaaaatgtytaattcagtaggtcatgatttgtctcaatatgctacacagatagatgtcttaaatatgcatatgccctttgggaggctgaggcaggaggatcacttgaggccagaagtaagaaccagcctgggcaacatagcaagacctgttgctacaaaataataataataataataaattagccaggcatggtggtgtgcacctgtagtcccaactatttgggatgctgaggcaggaagatttcttgagcccagaggtttgaagctggagtgagttatgattgtgccactgccctccagcctgggtaacagatcaagaccctgtctcttagaaaaaatgtgcatatgcacatacacattataggcaatttgtttatctctttgtcaagaaatttgttgcttatatacacataaagtttcagctgcctgagattagtgactgtggggctgctactctagcatcactcaggatgtcccttagtgcactgtttccagctggtaggtgggacatgaagtcagctccccatcttccctttaccttctctgactgatagggcggactggcttccctgcctgtctgagccaatatatgaggaatatggttctcctctgccatctgagtccttgaagccctcaggctggttgtttgtcctggcaacctggattatcttttctccttcctctcaggtgaagcaatcctttttctctcactcactagaacgagcaaaagtcatttctccaagactctcctgtcaccccagtgctagctaggtgcctcatgttatccttttccttcagcaaggatgatgagaggctgaattcacagtcagtagccagactatatgtaaaaatagaattttgacccacaacctgcagtaacctgcccaggaaaccaatcccttatctatgataaacagcccaggaaaccagcatgctataagtcagacttgcaggaagccagacttctgtatctagtaacaatccagggagctacacaatcaattctgtaacaatcagaatagccccaaatagccaggatttgattaataactraaggcttccctgaattttgtccacagttccaacgtaagcccaaccagagagagccaaatatgcaccctcctctaatcacataggatgtcctgcttctagttagccacttctagcttccttaggccaacagcccccactcagagcatgcctgaagccttctcttcctattataaagctttcctactcctctgcctgcctttagagtgtctgccaaaacacaagtgacagtggctgactcccttgctgtagcaagcttagaataaataggctttgcatttctcacttcattgacttttatttccacaataagaaatgtcacctgttggttgggtgcggtggctcaygcctgtaatcacagcactttgggaggctgaggtgggcagatcatgaggtcaggagatcgagaccatcctggctaacatggtgaaaccccatctctactaaaaatacaaaaaattagccaggcatggtggcgggcacctgtaatcccagctacttgggaggctgaggcaggagaattgcttgaacctgcgaggcagaggttgcagcaagccaagagcatgccactacactccagcctgggtgacagagtgagactcttgtctcaaaaaaaaaaaaaaaaaaaagtcacctgttttcttttatctgtatattcacacttgaaaaacaaggagatctaatcaaagtgtattaggaccagtgagagattacactttaatgctagtaatttccttagcggtgttgttagaagtattgcaaagagaatttgctgcaatagcattacagtcccatggtgtttgatgtaataacctcatctcagcacccagggggatccccgccatcctgggatgttgtttctaaggcagattacactgctactcgtcttatcatgtttagagtataggcatgttttgactaaaatttaagcaagctgattttatctcttaaaaataagatacataattcctcaaataataactaatgacaagcatattcttaaccaattagataaaatttagtacacagtatactaatgcaccattgttatcaattcattctaactccaatttaatacacagactttgccaagaatagcctttcacagcatccctttcctcaatttagagtcagaaactttcaaggaatgtataaaactctgggacttttctcaatttccagtgtctgttttctcgatgcctctttttcttaacagctagtcacaaasagttactaacctaatcttgcttatgttacactgaaccctaagagttgttttgttcacatgttaaaaacagctcttcctgcatttcttcaaaactgtgttttattttgctcctgcgaatttaccttttcctatgttgatgtgaatatattcttgatccccttccatctgctgtttgcttttgtagctagagctttttcaaacttgaagctatataagtgttatgggctgaactgttgcttcccacaattcctactctgaaattctactccccacgacctcagaatgtgactgtattaagagactgtgtttgggtctttaaagagatagtgaagttaaaaagaggccattagggtggaccgtagtccaatttgattggtgtccttataagaagaggaactttggaaacaaagagagacacccaggatgcatgtccgccaaggaaatgccacatgcagacagtgagaagttggccctctgtaagcccaggagagagccctcgaaagaaaccaaacttgctgaccttggtcttgaacttctagcctccagaactgtgagaacagaaatttctgttgtttaaaccacccagtgatactttgttatggctgcccttgcaaattaccattagtgactttccttcgtaaatcccgttactgaaatgtgtactaactgcctcagcaaaaacttttctcggaatggtcctattttcccacatacaagaaaatatttaaagctcagaccaattatgattgattagaacaaaattaaaatggtttaggtcaaacctcaagtatcacttgtatcatcatctgagtgtgtcatgggattgaggatatactaactaagtgatgcaaggaaagtgtataggccaagaggcaaaaagaaaccaggtcaacaagaaatcaatatatggattagcagagtttgattcaaaatgtaaaatatgctgatacttttttttttactttctactgcatatctctagcatgtggaatatcattactttgagtttgatgatctcttaaaaacgaatttgaaagactaataaggggttttgccggctaataggattttctttctaagcatcactagatggttggattacatattacaagatttgactagtctaggagaaaaggaggtaaaagtaaagaaagaaaattcaattattagagatatatagaaaatatgagtgggctgggcatggtggctcacgcctgtaatcccagcactttgggaggccaaggcgggcggatcacctgaggtagggcattcaagaccagcctgaccaacatggagaaaccccatctctattaaaaatacaaaattagctgggcatggtggtgcatgcctgtaatcccagctacacaggaggctgaggcaggagaattacttgatcccgggaggcagaggttgtggtgagccgagatcgcgccattgtactctagcctgggcaacaagagcaaaactctgtctcaaaaaaataaagagtcaagaaggattaaacaaactgagcacatgcatttaatagcaccccccacctgaaacctcacttaaatgacaatacaagaataaaatggcacaaattgtattttttaaagggagacaatagcagatgaacagtgtcagcgtgtaattttgaaagtggaaaacagaagtagatgatttggcagatctaagacagcagaaactgtagcaattacagagaagcttccaaagaagaaattcaaggcacctggtactacagcaattcaagaaactgcatggcctcagagaatagacttatctacgctgacattttaggatccccaattaaaaaacaaacaaactggcttgacaatgcacccaacatggaggcctgtcagacacaggctctgccctttcacaagatgtccaattgtagtctcaattttataggactgacagccaaggatcacgaaacattaaggagatttttaacacgaaagatgaacaaaacaaaaagaatgatgtagcttgtgggaaatcgagaaaatgtagggaacaaaagaaaaacaaaataatacctctaatatactcagagcaataagagaagatgtgtatctgtaaaacaagtatgggatactgtaaaaaggaagaattgaagacccagaaagggctctcagaaattaaaaagtgtgatttgcagaaataagaatttaaagcagtattagaagctaagttaaggaaatctcccagaaggaaaaacaaaaaggcaaagatggaagatagaaaacataggatgattagaggctcaatttaacatagctgacattcagataaaaagagttccagggagaataggcaaaaaaaaaaaaagaagaagaaatgaagaaatgaataatattagaagatagttcagaatagaaaaaatgtgagttttcaggttgaagggtgccactgagtaccctgcctttacattaaggcatattgccatgaaatttcaagaaacaggaaagaaagagaaggtcttaaaatcctcatcatcatcatagctatacttgcatatagtgcaagcacttttcacacatttaattcttaaagggcctcttgagaaaagctttataaactaaggcacagagataagtaatttgccccaaatcacacagcaaataagtggcagagtcagatctccaaacatgcagtctggctccaaattttatacccctaaacactatactatcctgactcctataaagcttctagagaaggaaggataggaagagggagaatctaaaagtcatcaggtttccaacagcaacactaaaagttataatgtaatggactaatcctttcaaaattataaaaagacattcctcttggcaataattttgtggatatgacatggaaagcacagacaacaaaagcaaaaatgaacaagtgggactacagcaaactaaaaagtttctgcacagcaaaagaaacaataaaatgaaaaagcaatctatggaacaggagaaagtatttgcaaaccatatatctgataaggggttaataaccaaaatatagaaggaactaatgcaactcaatggcaaaaaaactgaataacccaatttaaaaattggcaaagggcctaagtagacattttttcaaagacctgcaaatggccaacaggtatatgaaaatgtgctcaacatcactattcatcagagaaatgcgaatcaaaaggacagtgagatatcacctcatacctgttaggatggctattatgaaaaaaatgaggtaacaagtgttgatgaggatgcaaagaaaagggaacacatgtacactgttggtggaaatgtaaattggtgccataatggaaaaccatgtggaggttcctcaaaaaattaaaaatagaattattatacaattcaacagtcctactctaattatatatctaatggaaatgaagtcagtaactcaaagaggtatctgcacccccgtgtttattacagcattatttactatagtcaagatatggaaacaacctgaatgtctatcaacaggcaaatgaagaaaaactttagtatataaacacaatgggatattattcagcctttaaaaagaaggatatcctgccacatgcaacaacatgaatgaatctggaggacattatgctaagtgaagtaagccagatatagaaagacaaacactgtatgatatcacttatatgtggcatctaaaaaagtcaaactcatagaagcagagaatagagcagtggttgcctgggagtggggagtgggagaaatggggacatgttggttgaagagtacaaactttcagttataagatgtatatcaactcattgatatatattgccctttgccttgttcactttgaatatattcaatctctgtcaactatacatttttaaaataaaaatagtatcacactagataacaagaaaaaaattataaaacaaaattatttactaactaaataaatttacaacctaaatacctaaccatacacactcaaaccttcaatcaggtataagagcttgagacactttcagaattcaattttacctgtggtgtgtccttcctcaggaataactagaatccagtaattagggagcccagtaccaggcagaggccaaggggagttccatggccatcatcatctagcaaattcagacagtaactgatccagatcagagcaaggcaaatggctgcgggagggttatcttcagaaaaagagaaaaagcaagaaagtaatcaatttataatgtttttggcaaaaggtagaataaaagcatcaagggatttaatagcactctttcagagttagtgaagaaatagtatgaagtgcattacaaaataaagccaatgaaaaggggacagaaaaaaaatgctgcatgtgacatgaagtgtaatcattacaactcaagtatgaatgatacctgattgtcatactattataaaacctgaatgtgaatttgcactgatatgaaagatttgtgaaattaactgtattacaaggatggagaaggaagacattaaattgtttaattgttaaccttctataatagatgagtgataatgcctcaaattaataaatcaagaatagcaatataacaggctatttagatataagcaggttaacaacagaagaaatattttaaataattagccgggagttatactgaggattggggaagagttggagaagagactgcaattctcattataagacctgtagtaatatttgactttaaaaaatgtgtattttttaattgaacaaaaacattagtaagaaaaatagttaaataaaaatgagttaggctttagtttgcttctcaaaagaaagactttctgcaggaagtcaattttaagagaagattttaaaaataggacttaatttgatgttacagagaaaagtacagcatccaggtggcatgagcaggctgtctggggagatgaggaaactgctcctaactggatgcaggtctgggattcaggagagctggggcaggatgtgggattcatgaggtcagaactgggaaggccatttatagatgcctagagtgaaaaatatarctaaggtgtaactggtgaggcacatgctgagatggctttatgaagccatgtgctgccgtagaaagaatcaaacctgtgctttctaaagtctcttttgccacaagaagaaatgggaattagaaactggtgtctttcgggcaaccaactgaatactgatgcaattagtttctctttcagttttatgaaatagatgagtttagagtcaagggagtaatatttcagaagaggcttttaaaaatgtaggcattgcctgctgtttgtgagccttcaggttttctgttggaatttcctaaaaactggattatttgccattgaagacaagtgggtggtattagtgtagagaaaattcatattctctctccctctccctctcttctgcacacacatacgctgatatggtctgaatgtttgtgtctcccccacattcatctattgaaatttgactcccaaggtgatagtattaagaggtggggctttgggtgatgattatgccttaagggcaaaacattcatgaatgagattagtgcccttacaaaagagtccccagagagtttggttgtcccatccaccatttgtcgaggcagctagaaggtaccatctatgaaccagaaagtggccctcaccagaattgaatctgcctacatcttgagtttgaacttctcatactccagaactgtgggaaataaatatctgttatttataatctacccagtttatggtattttgtttttgtcctgaatagacatacacatgccgagtgtaattaggattgatctttaatttcctctaaccatgtgaatattatattacgtgattccttggtttgtgcttaaaaacagcattcttaggtcccatcccggatttccccccagtgcccctaaaggcccctggtttgtctttccaaagttggaaaacgccttcaaacacatgtcatcaggtttaactggtgggattttttggttccctcagttttccccatttgccaaagatgttgaactgtcttggtggcatgccctctgcagggcgctcaccagggagcatgttgctctctaagcaccttgcaagtgctcctgaccagtacccacagtcacaggtacccagtaaatctctgagaccaggaggctggggtacctcgcaattgctcttttgctcgaggggagcagggccccttgagtccactgcagcctgaaatccctgtgcctaaatgtgaccttctctaattgaggaggagatagtacagaggggttttggcaccacctgtgctgaccaccagactgtgggatttaggctcattaaccacacaaggagtcatttcatcatccctaaactgaagaaatttcagctagattaacagtatggttccttcccaatgtaaaattctgtaagaaagtattgaactcaaaagagaaaataagcgactgttttataatcaaaatggactagatagtactgagttagtagtactagttaggactgagaatgtctggtggcatattagggcatgtgttcagagagacccttctgcaccagtttgccccttttgagcacgagtctgtcatccagtacatgtgtgccacatataacaaggaaaagccaaaacatttcttaaaaaattattactattcacgaaaagtaccttggcaacacttcccaggggaggctgtgggtgaaggggcaggaagggcaatgtttcatatataaaagatagtctattcttaagtaaaaaatgttaaattatattgagtgatgcaatcactttaacatttttccctagggctttgtgccctattttagtaacaaaagatcagctgtttccaaccatgcccctaaatcagctttaaagaaataaaagaatcttctaaaatatcaggagggaataaaggaataggttgtccttataaggcaccaataacctcatttgaaaagtaattttatgtgttagaggagcaattcttcccttgtctgtgtgtcaatttaacaagaatgtaacagatttatctagcaacttaaacaagtgacaatatccagagtgagtgttggcaattgaggtgcatttgggaagatgtgaacatacagcgaaatcctagggtgcatttttttcttttccatggtcttggggttttttacaaaatggttgtatgctctcaatctgtggatctgacaaagtaagggcttttgaatgtctctttattgaaatgcgatctttgccctgttcttcatgaactgcccacttgggatgaagtaatatggaacctagttggtggaacagagccctaaacatggataaatgaccaggacaacgccaagctgggcaatggtagtagcaggtgtagatgtggtcaaactatgcccccagttggcaaacaagatgaactccctctggctcaaaagttaaaagcagaactaagaggccatgtcaaggtgaggaggcagtcacgctctctgtgtccttggaaggtgtttcagaatttgtttttctgcaaccaagtcaaagaacagtttttgaaaacaactacaactggaaattcctccatctgaccaccaacaagaccacctagcaccaacaagccaaccaaccacctggaaccagccaattaaccaccagagactggtgatctggggctgaaaggccatccagccaacattcttccttgctcccaacactcctcacctgccctgccctgcagttttggcctttgtcatctccttccccccgccacccttcctgggagtgtactttccaaagctgcatctccctaatctgcagattgcttttgaaaaataaagttctcctttggcytccccacatctcattggtcttccgttaacaatattaacacaaattaatgcatacatatcataaaattataaaatcaaccaaaatctctttcttgccctagaatattttaatagctagtgttttcatgtgatataaaaagtattcccttgtttggctggggctggcaccatgtttccacataaatctctgtctatatcacagccttctggctctgcagccatcctgattccatatcaccttcttatgtggaatcatgagtttataaagcaggacttggtaaaaagacactctacacattatctcgtgctttgctctaaccaataattgatcattttgcttgaccaattcaaatgatagagaaccatgatttacaaagaaactcaatcaatctttagaatattctactggttttccatttttccataaaaatctgttttttggtttgtaacctattagttctagtcccatgctcttgagtcactgaaaatagatctgcccctgattcttgttgaaatcagctaacatgttcctccctgtccatgaatctatatactcaactatttcatccatttctcatagaacacagaaatgattgaaattattaacatttcaaaattctggtgtatctgtacagctttgtctctgtcctgaagtaggaaagctgtttttatgcttgtctcctgatggaaatccatcttagtttgctgctcagatcctcacctttgccttctcccctacccaccctactgtcccccacctcccactcctaatcaacacccagtgtgatggtgcagattgcccagaggatcttccacaggatctaccgtcacctgcccctccactcctagtctctactggtcataagctccctttctggcaggggctaaggctccctcacaaatgagaagtcaaggaaatatttttgtttggctgaattctaaacactagtgcatttatttgttttggtttgctgttaatgttatatatcaaaaatcctccagtggatactcttctgatatgttgaatgtttaacttatattgaccatctttaatggcatctttgtgaggaactctgttgaaaggtgaaattacgtctgtgatttctgttccagtttagaggctgragtgtcacatggaagttattacagtgtactgatgtaatctgatcaacaagatcagtactcttcttaggttgtggtttcaaaaaaaagtctttaggcaaaacagattgtggagagggttattctgtgaagtttctaggagttattgaaattgttatgttataaaaacttttggtttggaaaagtcatgagatttggggtttttatagctgtgacaagaagtcccagaggaaattgaaatataagcaatctagataaggcaaagaattagttcctttctgagacgaacctcaaaaaaaacaagagtcatyatgaggtgctccaccaggccctttttcagtccagtaaagccagaatcttccctctagtctttagaaagaaactggaagttaatccgagatgaaggccttgcagtgatggataaagccaaaggtctcttcctgcctgaggatgaaaacctgagggaaaaaggggactggagccagttcacgctgtggcagcaaggtgagyttctgacttctagatggttctctgcagcccaaacctgatgggaagtgggtactgacaagagtcttctggtgatgcttcccagagctgggattcccaggcttaaacgaggggcccaaaaaaacctagatttttgaaatccattcattgtttttgaaaactacatctgagcccttatttgtatgtgtccaggtatattgctgtgtgtgtatatccatgtgtgtatttggataaatattcatgaatagtgttctgatttttctggtctttcctgttgaatgatgtgttactgactgtaaccctactgtgtaggcataactgaaaaatctagcaggtgttatcagtgtattagaaagttatgtccctgagcatcatttgctcctataaaatggaggtgacgttgcatggcaaaatgatatcaacacggatgatggtaaaaatggtaacacaccagctggtaaaaatggtaacacaccagagtgacaagacaataataactgctgtctcagctcttcaggaataggaagtggctcatactgaacttcatatttttttagcttaacccaggtacaggcacacatatggagctccagcgtgtgtgtgtgtgtgtgtgtgykcgtgtgtgtgtgttttcagtgaattgatatattcatctatctttaaaatgaggagcatttaagactccaattttctccttgaaaagtggagttagcctggattaacaataactatataaaagtaaatttattttgaagactaaacagcacgtgctgcatatcttcagctacagaaaacaaattcagattgtaatatgcatctaatttacactaaaggacaaataaggacagtggtttatctcaattatgctttcagaatggtttctatgtaagaataagaggaactactttagtaatgttttcagggatacttccatctaaagagagagaaccataaagaaaagtgtctatccactttttgccaacaagaattttttaaatggagctatacaatccatatttgggcaatatgctaatttacctctgacatgtcactaagatgagtccattctattggcacttatgtgttcaccttgtactttgattccattaacatccttatgcatcacagaacctactgggcctcctagagcaatgcttcagaatagcaggcatcctagcactaatttctagaaactgtagtttctgccaaaaaaaaaaaaaagtatttgataaaattaatatgcaaagtattataggatataaaaagcattaagcaagaaagaaaataaattatggagtcaataatgttgttggaggtaacattttgtcttctacattttcacataggtggaatatacctgattttccatgaactacttaacttcttagaatgtgttttactttcttagtatctttgttaaattcttattcccattgaatggaatttacatgttctttctttctctttcttacatgtgatagaattgtgtctaccctgttgtttaaaaaactcataaaattatttctcacttacatgattatgattatattttctaattcctgaatttgtattttctcttccttctcctgttcttttttgttttgttttatttttcttttaaatattttgattggaattccttagtaaatttattttcattctttcttattaataatagcatttaaagctatgcactgacctacagttacaggtttggatgtattccctacactgtaatatatggtatttttacctgagttattttcaaaaaaagactgcatttctgccctggtttccacattgacttaaaatgatctatatgtatatgtgcctgtgtgtgattgagcatgtgttttccaatctgttgtagttgcttcaacattgattgattgattggcaggatcttgctctcttgcccaggttggcgtgcaatggtgcaatcctagctcattacagctccaactcctggcctcaagcaattctcctcccaagtagctaggactacatgtgtgcgtctacatacctggctaatttttaaatgtttttatagagatagggtctcactatattgcccaggctggtcttgaactccttggcttcaagtgaccctcttaccttggcctcccaaaatgctgagattacaggtataagccactccactcagcctgcttcaaattttaaaactgaatttctagttttattttattgtcataaagggataaaattcacatagtttcccttttaggaagattttttaaagttctttatggtctttggtttgtgattccatgcttctagtgggggaatccagtaactattttctagaaacaaattcatagtttaaagaataaatttggggctcggtgtggtggctcatgactgtaatcccaacactttgggaggccgaggcaggcagatcatttgaggtcaggagttcaagacaagcttgaccaacacggtgaaaccccatctctgccaaaaagacaaaaaattagctgggcatagtggcacgtgcctgtaattccagctactcgggaggctgaggtaggagaatcacttgaacccaggaggcagagattgcagtgagccgagatcatgccactgcactccagcctgggcaacagagcgagactgtcaaaaaaaaaaaaaaaaagaaagaaagaaagaaaataataagtgtgatggcaagtactatcgtagcttatgctgaagcaggatggcatccatgtcaggtgctgtggttcagaaatagaggagaagaattctggagtggaagggacaggggcggacgtcatagggagggaggtgagtgaccagtttgcttagccacattgagaactcagattcagagaaaaaggtgatgaatatctggctcagtaaagatttagccgttgtctagttagcaaatcatgctgctgggtagtcgaatgcctaaggctgatgctggaagttttgggaagtaaaattacggtaggtctcttctatggactgaactgtgtaccccgcaaaattcatatgttgaagccctaacccccagtgtgactgtatttggtgatagggcctttaaggagatagttaagattaaatgaggtcataaggatgaggccctgacccaatataactgattccctgataagaagcggaagaaacactgggtgtgttagtctgttctcacactgctatgaagaaacactaggtaatttataccaaaaagaggtttaattgacacataattccacatgactggggaggcctcaggaaacttacaatcatggtggaaggcacctcttcacaggacagcaggagagagaataagtaccaagtgaagggggaagccccttataaaaccatcagatctcgtgagaactaactcactatcatgagaacaggatggggaaaaccacccccatgattcagttatctccacctggtccctcccatgacacatggggattatgggaactataattcaagatgagatttgggtggggatgcagccaaaccatatcactagggatgagaaaatgacgtgtgaggacacaagaagaaggtggccacctaggagccaagaaaagaggcctcaggagaaaccaagcctggccacaccttaattttggactttcagcctccagaactgtgagaaaatacacttctgttgtttaagccactcagtctgtggtatttgcttgtggcagccctagcgaactgatacagtatccaagtagtttcattaggactgaactatgtttttttaaaggactggctttttagagttgaaggaaaaaaccagaatcagcaaatataaataatgattttgttccccaaaaataactttttaaattgttatgtgaatattatggaacgtctattttgctcttatcttaataagtgccaccaacagtgattaaaatatgccacacatgtgcagtcatttttttcttccagagcccatgggaaaggtgctaactgaccccaacagcctttctgaataagctgaggctgaacctctaagtccttctcaacgcagtgttctaggtggctgctagcaactgatcagaaytgtcatgcaagatggaacctgttgttgccccagaagcagagccttgaaatttataaaagatacaacccaggatatcagttccatgaatagccctcacaaagtatattcatgtgtaagaagtgataaatttaaatgattcttccagatttgcattggctgttagatctctttctagagctattttcccaaagaagcaaggtttattacttcttgagggttagtttaacgctggtgagaaataatcaaacgacaacaaagccacagtgagttgcagatgctgggcattcctcttcaggctgagttaactggtttgctcctgcacagctgccttctaacttacaatgcaacaaaatgagaaattatgctttaaagcataggctttggaaaccaacaatcctaggttagagtcctggatgcaccgcttgttagctgtgtgatgtgtgcatgtccctgaatctctgagcttcaaatccctcatctgaaaaatggcaaatagtgcctcaagtatggggttgttactaggatcagtgagcactagatgaaagacttggcacagttatccaatatatgatagtaatattatatttttatggtctaacaatagcacatgatgtaataacagtagtggagaggtggtctctggtctggttaagagcatgaacactgggtccagtctggctgaattgaaattcctgctctgctgttcgctatgtgacccctctgtggctcaattgcctttctataaaatacaacactaattgagccttcttatgacatgttgtagacatcaaatgaggcactctcatcatgcagagtggttcctggcctgtcgtgagcatcaaggaactgccgttgcattccttggaccctcatgatcagacgtgaagagttaaaatgaccagtgacagtgcatgaatgcccagagtctactgcacagagaatctgggtttacagaccagaaagataaatgtgtctaaagagctagaggtgttctctaattccttgaaaatctcagggacacaacccatttggttacccattcatcacctgtcattcaggtaaggcacatctgttctccaggtagcacatgctcagccacctggtgcttgtgagaactccaggccacctatggttgttccccaagccaccagtttcacttaactgctgcctggacagcacagagctcagaattggggactcctgccaagcagccccaggccctgcataccagaagacttggaaagcccaggctcaaaaacactttacggtgactcgtaggtttatgtaatattcacccaaactgacatttattgttcatttggggaactccattaataactaaaaatagcaattaacattttattcaattaagagccaaaaaggttacttagaaaaagctaagttgttttctaaaacattgagctccatttgattggggtgaataccttttagttgcgttttttgtaactcttattttattctcagtatgtgattatcttaggacacaattaacattaattaaataaaattaaactcagctttagatgtagcagtctcttttaggaatcttgaatagggaattaaaatgtctctgacttttaaaaatcccattgttttactcccccgttagagcagatgacattgtgtacattctgagcacatcttccctaataagcaggggctttatagagtgtaaagaaatttgcatagttcaggatacttaaatgacatgtcccagaatctgtgctcttgacagttaatcatagaatatgtcccctctcaaagacgccttcttcatttaaatcctattctttatcatcatataaaggatgatctggatatggaaaagacattgaagtccaataaaaatagtgttttggcaactaatatagtcctagaaatgcatttctaagttagaaatataatataagctattttccttctttaggggatgtattagtttcctgtggctggtgtaacaaattaccacaaaacttaatagcttaaaacacagacacatttattatcttatagttctagaggtcagaagtctacaatagatcacactgagctaaaatacaagtgtcaccagggctgtattccctctggagtctccagcttctagaggctgcccacattccccggcttgtggcccccttccatcttcagagccagcagtggccagtcaagtctttctcatactgtatcactctgacacttactcatctgcctccycccacatttaaggatgctgtgattaccttgggcccatccaggtaatcttggataatctccctattttaatgtgagctgataagaaatctcagtgccacttacagccttaattccctcttgcatgaaagayaacatattcacaggttatgggatgagggtatggacatcttttgggagctaactattatttttcctgtcacaggggaaaaaataagtacagttggcctttgaacaacgtgaatttgaatgttatgggtccgcttatgtaagaatttttgtcaatatattggaaatttttttgagatttgtggcaatctgaaaaaaatttgcagatgaaccttatagcctggaaatattttttaaaattaagaaaaattaggtatgtcatgaatgcatgaaatatatataggtactaatctattgtatcatttactatatatatacaaatctattataaagaaataaaatttatcaacatatgcatggaagcacttacagaccatacatagcaccattcatagtcaagagaaatgtaaacaaacatgaagatgyagtgttaaatcataactccattaaattaactgtagtacagattatactactgtaataatttcatagctgcttcctgttgctattcggcaagctcaagtgttttcagtatctgcttaaaataccatgtgatactgtcgtctccatgtgagcagttcctctctctggtaaattgcatatcacggtgaaaagtggtctcttatggttcttgtgtatttttccttgtgtttaatgcaatgctgcaaacctcgaataacaccatgggacctatacaaagagcaactaatgatgatggacacgctgccaagaagcagagaaaagtcatgaccctacaagaaaaagttgaattgattgatatgtactgtagattaaggtctgtacctgtagttgcaggccatttcagacattcaattcatcttgtaaacagatgatgtaaacttatggtatcgataaaataccgtacagtactgtaaaagtattttctcttccttattattttcttaataccattttctttttttcagcttactttagtgtaagactatagtatagaatacatataacatacaaaatatgttaatcaactatttatgatatagggtaaggcttccagtcaacagtaggctattagttgttaagtttttggggagtcaaaacttaacatgcatggaggatcgaagcccctaatccctgtgttattcaaggtcaaaggcctttaacctgtgtcttgtctgttagacattcttagtcaaatagtccaacaccgagtgaagaatttggatccctgctctgccagtcactacctattggagcaagacacgtcttctttattgataaatttttatttatttccaataagccttttgcattcctacttcatcttctcatgtttactcaatcttctcattcctgcagtgrggatgacatatagctctcacctcatctaaatgggataagtttaagctttactgtgatttgtttccaacaattatgttatttattctaggaagaagaaatgaaaatgcctgcaaaggagctcctaaaacctgtaccttactagaaaagttccccgagacaacaggatgcagaagaggacaggtaccaagagtgtcgtgctggggagaatacaattaattgttaggaataagggcgtgttgacctttacaaagaaatggttgtttcctttggcccaatgaatgcctctttttacatgccctttttactgaaacataattttatgtggttgacgtcagaattgagggtggaaaatgttcagtgtttatagctttgtggaaaatgtgagtgcttatttttagttccttcacaaagaaataagacttgaatataaatattaaatcttacaaaggctctaatccaaactgacagtaattttgtactgtcaccttaacttagcagttcctccacaccttgataaatggctgaatggagtgtcatgttttctatgcagatcaaatattccatcatgcaccccgggactcacgtgtggccgcacacagggcccacaaactgcaggctccgaatgcacctgggcttggtgattcccaaggaaggctgcaagattcgatgtgccaacgagaccaagtatgggtcctctgttatccgtcatatccgtcacctcagaggatgagagtttgttacaacacagttgtgttcctttggattacttatcttcttttgtagctgaagtagactggagcaaagtgatattaatccaaactcttaagtctrtatcccttcttggtgctttctattagcctggagacattgcccagctctagggctgccctcctccattatttctcggcagagtacttatctagttgaggagctgccttgtttctctctctgggtagacagatgtgcattcagagtcagccaacatgcattgagccctgcagatgttatgcattgtgcttcctgctttgcaacttgacttattcatgactacaagaagtacccctaactgaagaactcaccccatgatatttatacgttttgatatagaggagatggtatggtgcaatggaagctggctgcctttttcaaatcccagctctaacacctaacctgtgtaaccttggctagttacttaatcccttcaaacatcagccttcttgcttataaaattggcagtgataacatctactttgcagggttgttgtatggattaactggaataatgcctataaggtgctcagtccatgttctggtatcagtcgggacgtgatgaatgttagatctcctctccctcccttgcgtgttactttcctaatcctgacatgtttattcatgatcttttgaacaaaccatacttgctctggcttctgtacctatgatgctgataatctctgtccctagaatgcccgtcttttcacctgtccaaaataaacctattactaagatccaatttagttttataaaaatagaacctctcagagtatatatcctcagtaatcccattcctatcttctattactctttattcattaatatatattacccttatctccatagcaagctgtatgtaagctcctggagatcagaaagcaagttattgttgtcttacacatttcttattgttcttagtagaggtctgagtggaggatgagtgttcaggggtctgcagaattgtctatttgattattggcagataactgccctgggcagcccatggtgctgtgggaaattcagagatgactcagaaggggccgtcctcttctgaggacacctagcaaggtgtgtctgctcaggaagataacacaagattgaaggccaccgtggtcatagaagaggtactacagatggcctctctacagataagctaaaaatactacagatggctccatgagcaggagcctcacctgctcacagacactcaacttgcagagtggtggtttttaaagacaagaaggattcggacattgaaagctaaagaggggtattctggaacagtatccattaaaggcacagaggccaaaaattatggccacatatgaagaatattgaataataattcagcagccagcagtgtatggtacataaagaataaggttgcaaagtgaaagagtcttttagaaactaaatcataggaggctttgaatcccaaactaatgggatcagacctttgttaggaagttactgtggaacccatgggtgaatcctatggggacagtgggaagaacaattagcaggctgtcacagcagcccacccaaaagataaacagagctggaattgggatgctggaaagaaatggaractagagagcagatgcaagaggtgactcttgaatgtgtgatacaggaatggggcatccaagatgctgctgcaattgcagtctttggacagtggagggtggcgatgcttgagcaaaccttgggaatttgggaggcatgaggcaagttcaaggaaaggaagatgaatttagtgcttatgtattttatttagttgctattggaacacacttgtagaaccatccaggaggtggctggaaatagagacctggcactcaggggagaaggtaagtctagagataaagatttgagagtcagacttatcaggaacttctagaggaagcttgagacaatcgaaggatgacagaaatgaaaaggttccatgaaaacatctgtatttagaagacggaaggaggaaggagaaccaagaaggaaatggggcaagaaaggcaaaatcgggtagaccaggaggaggaatcagggatcactggacaggcagaagtttcttcaggcatggaatgaatcttgtcttacactgggaactcggtttgggtcttcagggtctctctgccaaagtgaaaaggagcagggacacattggaggatgcaaggaattcagagaggaggttggagaatgctggagcaggcagagattgacaaggtaactccttggagatcacatgagagcatgaggcagtggagatggagaagagcacccagcctcatgcctcagtgcttcttaggcttttacagcctatttgttctttcaccagctcacttgctctctccctcacctcctacctcctattttttctctctccctccctccctcccttctttccttcctcctccctcccttctttcctttctgcctgcctgcctccctctctccctccctccttccctccctgtccacccgcctcctgcctccctgccttcctgccttcctccttctcttctatattctgcttgtagatacttggaacaaaatcactagagaaaaatccacttaggaccaggcaaggtggttcatgcctataatcccagaactttgggtgcccaaggcaggaggattgcttgaggccaggagttcaagaccagcctgagcaacacagtaagaccctgtctccacaaaaacaagtttttttgtttttgttttgttttgtttttgagacagagtctcgctctgtcgcccaggctggagtacaatggggcgatctcggctcactgcaagctctgcctcccaggttcacactattttcctgcctcagcctcccaagtagctgggactacaggcacccgccaccacacctggctaattttctgtatttttagtagagacggggtttcaccgtgttagccaggatggtctcgatctcctgaccttgtgatctgcctgggcctcccaaaattctgggattacaggcatgagccaccacgctcagccacagaaacaacttttaaaaaattgcccaggagttcaaggctgcagtgagctgtgattacaccactgcactccagcctgggtgacagcaagaccctgtctaaaattaaaaaaaaaaaaaatctacttaggcataggcagggagaggaagagagatggaactgagcctagtcttcagtagcctgatgcagaaagagaaagccaagattggaagaatgggtgtggcagccaagaatgggagcaggtggatggtgccaggaggcttagcacaaagtcacagagggcttaagatgcatgttgggcatggtggcatgggcctccagtggctgaggcaggaggatcaccagagcccagaagtttgaggctgcagtgagccatgactgcgccactgcactccaacaaacatagtgagaccccatctctttaaaaaaacaaaaaaacaaatgcaggagtgatgctgggagacctgcctcaggagcacatttgtaggtgcattccccaccccaggctcccagcaaacaccttgtgtccatgcttgataaagaaaacaaccaccaacccctcccctaaagcttaaaacataattaggttaaccatcttcacctagcagaggcagaggagggttagaaggaccactccagcctactcagaggggggtcttgaatgagaatattaacttggcagcccctcagtttctgctgaggtaaaacacaacctactttgtgtgacaggatggagctgctgataataataatttgcagacgatgtattttgcaaatccacagtgattatttaaaagtgcttgcaactcacctgcctattgttgggccagggagactgcaatgcttctgtcctctcctccctgaagagttgctgagcacaggggtccttctgcctcaccatgactgctggtcagcagcccttctccacgttctttttattttaccagctttatgttgtgttacattctcatccttaatatttcttaattcaagggtggttgagttgggcttagcacttcattacaaaatagtgcttttcataagagaaatgggtcaattaaagtgctgtgcaatgcttccagtgaaaagagctagaaatctgatagtagacagtttataaactctgaggacagaaagagtctagtatgaaatctggaagttctgtgctatgattgtagaagtacttttggcatggaaagaaaaacacacatgccaagaaatcagtttccttgtgctagccaaaggcagcaatttttcagactgtctcaacttctaaaagaggaggttatctgtagcaatttgtacattgttcttttcaggtattaataatcggattaagatttccaccagtgtgtatactgtttaaatattccatccctgcaaagcgtagcatagctctctgaggatgaactggcaggtatgcagcccttaccactgtaaatgaaattattatttcaaattaataaatgccttctgattagaaaactgatacacgtccctcacacataatttgtataacacagagaagctcaataaaaatgtattgttttatcccaatacccagagctattgccaggtgcttctcaatgtctatatatgtgtattgatgataatgatgatagtaataatatacattgttccaaaattatatctgtgtcaaacacagctctaagcactctacatacgttaactgattcatgcttatggcaatcctgtataattaggattattaaaattcctgttttacagtggaggagactgaagtataaagataagtaacttgcctgaggctgacatttatatatgtttcctaaggctgccacaacaaattatcacaaactgaatgacttacaacaacagaaatgtattatttcgtggttctggaggccaaagtataaaattagggtgttggcagggttgttccttctggaggctctaagggagaatctgttcccctgtcctagcttctggctgctggcagcccttggtgttctttggtttatagacacgtcacttcagtccctgcctctgtgttcacattgctttctccctgagtcttctcctcttttcttttctaagaacatttatcattggatttagggcctaccctaatccaggttgatctcatctcaaaatccttaacttaattcaatctgcaaagatcttttttccaaatcaggtgatagtctcaggttccagatggatctatcgtttttagcagggaagggggacagggcggcttatggggacattcagcccactacaatattagtagtgggttcagtcccaggcattctggcttgaaagtttgtgttctagacatgatcacatagccttgcttgggctttttggattttgttgtagtttataaaattaggatcatgctgtacttataaggtgatcacttcaaatgctgggttttgtttccagacaagtagagaaagcagctgggagtttccctttctgggccttctgttcatgtcacctcagggggaccatgctttgtggtctgtaaaataagctcgttagagccgggtgtggtggctcacacctgtaatcccagtactttgggargccgaggcaggcggatcacttgaggtcaggagttcaagaccagcctgaccaacatggtgaaacccagtctctactaaaaatacaaaaattagccgggcatggtggctaatgcctgtaatcccagctacttgggaggctgaagcaggagaatcacttgaataatggaggtggaggttgcagtgagctgagatcacaccattgaactccagcctgggtgacaagagtgaaacttcatctcaaaaagaaagataagctcattagcaattttgatccggagctgagtaaacctgagtcaggggataaacatgtccccagcaagtgggaattaattattatactcaggaggtggctgagtttgtgagctttgaatgatcccagagagaaattcattcttctgaatctccaagggcattccacaatgtgctggaactgtgctaagagaaggaaccgtgaccttggagctctcctgcagattcagcattattgcctgccaattactagcctgaaatgttgaacaagactgataggttgtcaggaaagcacacatctacattagcgtcacttagcgacagactgaaaaaatgaattggcaatcaatcatttaatcctatagaattctatattgctgtagaaataatggccttcctccatagacctcaagtattttataacatatattttcattcatttctcaaggttccaattaggaagattgtgtgaaagtcatgctaaaatattaacagtaagagagacttaatttttttaattcatcatgaattcctcatagacaataattgtttagttttcataaagtgtccaaggagataattttaagactgtcttaaaatttttgaatcacatgtggaagctgcaatttaccaaatcatttagagccaaatattttcatccctcctttctcctttttttactattctccctgaaatcataaaccttctgttccacaagatattctcccatcttcatctgcattgcagtgtgaccttatccacaggtcatcactgaagcctgcccatctaggacaaaaaggacagtttttaaccagataggatgttttcctgaaggtttgttrttgaatagtaacattttttcctcttctttcatttgagcaacttggtgagttaaacacatccataccatgtcttgacccctgctctgtgacccaatggtgtgtctgtggctgttcctacacatgagtacatagaaagtgcacacatacatttctctacctccacagggaatggcatttcccatatggaaaatggattatgttccaaacatttgtttgttgaaccgattggtgaaaaggtgggatccatttttctctggcaatagtaaatgatgtgtggtggtttctaggtcagctcccagaagctttttaactaataatctttattaatagggctctagaaccagtgactatttatagtaatrtttctgcaggaaaaaatgcatcctgagcttttatttcagattttagtgttatgtatcttcataaaaacatattcagaacattgaagtctcatgacttgggttcaaatcctggctttccctcttgtaaagagtaactctatacaacttacataacctcattaagcctcaatatccccatctgtatattaggaagagtaaaagtatgtctttgtatggttttgagtattaaagtaatccatatgaatgcactcagaactgtayttataaagtgttgtgtggtaaatgcactcagtatatttgagcttttattatcctcctgtctgattgctgcagaaatggagacttctgtccttacgttccagggagtgagatcaagcactctcataacactggaggtggtgcttacagcctggagtgagtactttgacagcgatgggggaagggactttaaggagttaggaaggaggagtgaaataggagctggtcatgtgggccagggcaggtgaaggaatggtacagataggggcgtgatttgataggcctggagctgggagggaccctggagaagggaggtgtgacaagaatgcagcagagaccctccccccctactcacatctctcctttttctctctgtgcccctaccctggaactggagaggtaggggaaaggaggaaggcatcccatctctacagccctattgtcagaggcatttgaaccagagcagctccatcttgaataggggctgggtaaaatgaggctgagacctactgggctgcattcccagatggttaaggcattctaagtcacaggatgagataggaggtcagccaaagatacaggtcatacagaccttgctgataaaacaggttgcagtaaagaagccggctaaaacccaccaaaaccaagatgaccatgagagtgacctctggtcgtcctcactgctacactcccaccagcgccttgacagtttacagatgccatggcaatgtcaggagattaccctatgtgatctaaaaatgggagacatgaataatccattccttgtttagcagataatcaagaaataaccatagaaatgggcaaccagcagcctatggagtagccattggagtatccattcttttattcctttacattcttaataaacttgctttcactttactccatggactcgccctgaattctttcttgtttgagatccaagaaccctcttttgggctctggatcagggctcctttccagtaacactatgactttttctttcccttttccccttctttttcctcctccttcagtgccttcatctgagttacaaaccccttaaatactggtgacctggaactaagaggaggaaggcagaagttgtttgtgtgtgttagaaggggagagagagaagaagaagtgtgacaatgcagttttacgttttgcttacagtgtgtgccatcccagggctttcaatggagtctgaactggggaatttcagtagatcagaatgagtaagagctgtgtcaaatattcttattgacacagtaagagctgtgtcaaatatccttattcctgagctctctgacccttttctgttttcaactcagcctgtttcatgccttgcaggccacctcagcatgtcatctacagacactaagaatgtctcttgaccatggtcttaagtcaatgtgttgggctgtaatgactttctgcttctgccacagaatcacagtgtcactgcagacatctgaacctgtttccatgtgattcctttgcgtgaaaatcacagtcatgtcctttgcctatctcagaacattttagcaaagatagctaagatattatctataaaatttgtaggtagaagactctataagcacctagtatcattacttagccttattaatatcaatggtaattctgtgaccaaattatagttattaaatatgcactgccaccattttatcattatcattatttataattataataatttgagaagttgwcagattatggaatactgttttatcttaggacgagatattcttatatcttttgacaacccagagagagactttcttctcttagtggtaagaaattctaacagaaggccaggaacagtggctcacacctgtaatcccaactctttgagaggccaaagcaggagaattgtttgagcccaggagttggagagcagcctgggcaacatggggaaaccccatctctacaaaaaaatccaaaaattagctggatgtggtggcacatacctgtagtcctaggtactcgggagactgaggtgggaggatcacctgagcctgggaggcggaggctgcattgagctgtgatggtgccaccacactccagcctgggtgacagagcaaatcctgtcttgaaaaaaataaagggttaggtgggaggagagaaagagagagaggaagggaaggaggaagttccaacagtgagccaagcttccagggatggagagcagtgcccacccccaatgctgcttctctgggtccttagacaaggctgtaacagtacttccaggcagacctctgtcacaggccgctctgaagattgtttctccaaagggctgattgtatgtcgtaattcgagtgtaacttaatcttatttgatggagctttgttcacaaagcaagtggcctgaaaactagttctttgcattctaatgagagtctttggttttcagtcagaagcgatttgacatctttatgctcctctccctttgttgtggaaaaaaaacatcctttcccaagcatgtgatacatctcgaatttaacctggagtcacttaagtctggacatggcttgtaggatgttttattgttcttcattttccccttttaggtgaatcgtgactacagttttagtcattctatctctaataactgattgaaagacaccatttttttaagaattcagaagaaatctacattaaaaaatctacattatgttattgactatctttgctattttctggggaaatgtatgaaagaaagtggaagggcaaataagtccgacagcactcactttccccatagagttttatgaccctgaaacaggccaattaacaaccctttggtatacctccccaaatttcttatttatacaattggttaattaatggtttacactgatctgtattgtacttaatgtatctggaaagctgcaagcctgtggttcttaagttctacttttatatgcactgatgttccatgagtgaccagcgtgttccggtgctaataacttttcccagttctcaggaatttaatttaatgaatggaatgcttaaggcctttttcccagaaaacaattctagatctttggctttgttatacgtatcataatctagtgaaaaatgtcattttgtgtgggctagaattttctattcagttattttaattacttctagtgttttaagtagtttccaggttctctgccacccaaaaaactttgaaaatcacttgtcattgctgtacaaactacatttcacagatgctctgaagatgtttttatatctcatctcccttggaagtttttagttgtctcaaaggaaggcagacaacatcataaagagtgatgcatatgtcatttttgataacataccacttcccaacatttcacctctgtcttttatcttttccctatttttctttatattttcatttttctgtcattaattgaatatctactattgccaatcatatgctaatcctcacatcaattatgccgatgaagacacaaagaatcaattatgctaagtagctcaccttaggtcccataagtaataaatgccaaggtcaagaggattcccctcaaagaccataaatttccatcttcctgtattgcttctttctttctcctctaccacatgctctcctttgcctttcccttttttctctatttaattgtagtaaaatacacataacaaaatttaccatattatccatttttaggtgtgcagtttagtgacattaagtacatccatattgtataaccatcaacatgatctatcctcaaaactctttctaacttgcaaaactgaaactatacccattaaataactcccattcccgtcctcccaccggccactggcaaccactcttctcctttctctctctgtgaatttaactactagtctaggacctcagatgtgtagaatcaactagtaattatctttttgtgtctggcttattttacttgacataatgtcctctgagttcatacatgttgtagcatgtgtcaaaatttccttcctttttaaggctgaattaatattccattgtatgtgtataccacattttgtttgtctgttcattcactgatagatacgtgggtggctctcaccttctagctgttgtgaatagtgctgctgtgaacataggtgcactgcctttcattttgagtacacttcctccctcatcttctacataaattataggctcgtttgtggtacccactgacattgcttaatcccggtgacaacactgagacctagaaaatgcctgcctaactgtggaagctgtggactgtttcactgatttttcttgtcagcgtatttccccgccttggttttgcctttcttctcaagttagattttgcatggtaatgaatgcatattctgtcattttctcctaagtccatagatttctgtcttttgctacccttgatggaactccaatggaactctaaaaaccttcagaggagttgtagaagagccaatcaacatgtgtgtgttgaatgcaagagatgaggcaaggtgtattagtccgttttcatgcagctgataaagacatacctgagactgagaagaaaaagaagtttaattgcacttacagttccacatggctggggaggactcagaatcatggtgggaggcaaaaggcacttctttttttttttttttttttttgagatggagtcttgctctgtcactcagtctggagcacagtggcatgatctcagctcactgcaacctctgcctcccaggttcaagcaatttcctgcctcagcctcctgagtagctgggattacaggcatgcgctaccacgcctggctaatttttgtatttttagtggagatgggggtttcaccatgttggccaggctggcctcgaacccctgaccttgtgatccactgtcctcagcctcccaaagtgctgagattacaggcgtgagccaccgcatccagctgaaaggcacttcttacctggtggcggcaagagaaaataaggaagatgcaaaagcgggaacccctgatgaaaccatcagatctcatgrtacttattcactatgatgaggacagtatgggggaagctgcccccatgattcaaattatctctcatcgggtccttcccacagcatgtgggaattatgggagtacaattcaagatgagatttgggtggggacacatccaaaccatatcacgaagtgtatgagatagcacactgggtggaggtgggagggtgggtagtagaagtagaggttcagttcccaacttcagtgaactttcaacttgcaaatactcagtactttatctgttagtttacataacttggaaattttattatcagacttattcagtatgtcagttattttccactggaatgatttttgctcctgctcccaccctggacatttggcaatgactagagatgtttctggttgtcacaactatggcaaaaactacaattacttttgcaccaacctcatggtatagggaatgctactgccatacagtgggtggaggtcaggggtgccgctaaatatctcatagtgcatggaacagcccctacaacagagaatgatccagcctagatgtcagtagtaccacggttgtgaagccctgcaatatatgtagtattgctcagtttatattagttaatcacctgatatggaacataaaaattcaccactagttttcgcacagaaaacctctttatgataatatagtaacttgaaatcaagctagcatttcccatgctataatagtcattatttgctaatccaggatgtaaaattttgaaggcttaagtggcattttagtatctaaggaaaattttctagcaaaaattttattttaaaaacataacttggtatttaatatattggcagttaatatctatttttaaaataaggaaccatcagtgtccctcataaactctctttggatttgaaaagcattgtgttactgcctcctgtatgtttctctcttaatagactaacactatatttagatcgcagtccctatacagatatcttatgaggtaaagttggaagctctatagggtgttttgcagcattgatttaaaatatcccatggataacccacttgcatagaagatgatactaaaaatataaacaaaatttattcccaatctgcccattttcttcagctggaatactagctaggaaactcctaatttagttttctgctttatggtactgtgtttaagcagattcctttcttccataaaatgaaacttgaacaagtggagtgagctgaaaagacaattgattggaagtgtcttgagaggcatagagatgcctgagacccagtcactgcccatatgtctaaaccagaataattgcaagacatgtaataatatacagaataattgcaaggcatgtaatgagaccaatatgtcttcatcacaaatcctctgttgtttgtacatctccagcactgagcaatgaaaactgatgttcatagcaagatttctgaaattctttcctaatcatcaagggaagaataaacttgggcttgatgttctagttatttggttatgtcccaaaggttgttaccaaaggtagttctcgcacatggacaggaatcgatcctcagacatctgaaccacacaaaactatattcaggaatccttgtctttctgctgcaggacctgggaggaaggcaaggtgctcatctttgatgactcctttgagcacgaggtatggcaggatgcctcatctttccggctgatattcatcgtggatgtgtggcatccggaactgacaccacagcagagacgcagccttccagcaatttagcatgaattcatgcaagcttgggaaactctggagagaggctgcctttctggttccatctccttgggtgtgaggatagaatttcgaacaccaagagtcaattcccttgacttgcagcccgagtaattcaaagcctcctcctagggtcagaagacactaaagggaatatttgcctcgctgcaattcatttaggaaacaccctgctgtgtgtcatctcatgacagcactggtcttctgccagtatttaaggtgaacatttgatagcttctaccttaccagccaaagatattttttccacatagaataggtctaattcaatgtataatgagaacatatgtagaaactgtgaatggattgctttagtttgtaatttttctatgcagttatatttttctagtgtagctagactattttgtcatcatgtaccactacatttttgtttattttaatgacaagctgtataaatgctttacttctagctatttaatggtagcattactggggaactcagacttccctcttttaattcttcttagtaaaagatactcatgaaaaaagcagttttattttcctaacaaaaaagaaagagctcattatgtcagtgtctatgaactgtacccatcccaactctcaaatcgtttggttttttttatcttgattgagatcctcttctcactatgctagtggtggagatattgacaaaatcctatttctttcaaagaggaacttttcacaccgaaaaaagagcatggaattattttatattgttataaaaatcccagatgcaaatttttttaatgccaattattagagcttctggggaaaaagtatagttcacggaaataaaactatgttctttcagggttgggtggataggtggctgctagggtgtctggctcctggcggctttgccatccatgaggcaagggctgggaacacagtgtctttgcctatggtagatccatgtgaatgtcaggaagccagctcttcagtcttggagatgatttctgctacaattctgtagaaagattaaggatggcagagtaaaaggttaccaagaatgccaggatgtttttcttgggcgtaggaggtccagattactttcctttttgatgaaagagtttggaagactgtcccatctctctggcttgagaaatctctgccattttaaacatcactgtgaaatagcaattattatcatctgtatttagttttaacattacccacaacatagaaataataggtaaaaatcgtcttgcctactcattccaaagatgatcaagtcattaatctagcaaagtattcatgtatcagattttgtatattttgaatcaaagctaactaggaatgttagatataagaatgtaatgatattcatgcactgaattctaagccaatatgaacaaaaatgctgcatgaatggcacatataggtcaccaaagttcattcacaggtagaaaaaacttgtgctttcttttccatctaaaaacaaaaggagactttctttatctcatttaaagaacagctctttgaaattgaaattgaccctttttgcttgaccttaaggagattagcttccagtagatgagtttgcaaaatacttttcctgttcttttgttttgctggtattgaaaacatcccactaaatcagatgaagaggcatgggaggaaaaatatccaaattaattactaaaatcgagaagagaaggcaaactcttgaaaagtaaaaaggtgtttgtgaccttcagtatttattgaacagaggaaataactgacaagggcaatacaattcaatgttcatgtagtaacattcatgtcacttgttgaatttggttctcatatgtatattgcatacacataaattcaaactataagtcgtcatttttgagccatcatcttacattcatgtaatgaaattatggaagagagtaaaaactagctcttaacttagtaaatataatatggtatttaaaatcaggtcactacagtaaggttctaagtattgccaattgaaaagctagaaatggtattactgttgcaaagtgttgtcaataattgactccaatagcattgtaaatacttgtatcccacaactattttaaacccaagcaataaaatggattttctaattcacttcaattctttatttctcttacctatctatgtcttggtacataagaaaagtgtttccatcactgcattggtagaattatttcagtgttattatttttgtgatttcgtatgtctacacaaaaatgaattagtttaatttatattgtgatacagttgtttgagaaatatttttaattctgtttcaactttatttctccaagtgtataatataaaaattacttctgttattgttctctaccaataggggaaaaaattaaaacattagatccattgagaaagagatgatgtaataaataattaagattagtaataatattatcaggggtgattatgaccagttgaataatctctttcccttgaattatttagctaacaaattaactctcccaaatatttaaaataatgtaaaatcatattttactgcccattattaactaaaatatttttgtttgactttgagcaccaactggtaatactaataaatacccatgtcatgcagatggctgggcgaataagagatgtctaaaaatatgcactggtcttggaaaacatggcacaagtaaggatrtcatatatgatgtctgtttattttatgtctgatttcttttgaatgagtagttggggactccatttctaaggagactaggtaaataaaatgacctttgacatttcatcctgcatttctagtcttctcttacttcagtacttgcatatttagccatccatatgggtcatgctccatgattgaatatttaccctctcagcaacaaccatggtctttctccacatctttaatggttgcaggagggttgtgggggcaagggtaaatggtttgatagcacttttctttgctgtagtgacccagttgaggcaactggaatggattcattaatcactgacatgtgattttcatgagacatctcctctgcagacacatgctgcactaatgggcttttgagctgcctgtggtaactcacattgctcagatgaaataatcgtatttcacgtccatgtgtcttcctttaacgtcagctcatgacagtcagctagtgacctgacaagagatgtgacatcaaaataattttttgcaggatatcatcaaaataagcaaactttgcaaatacccagacctatgagaacatgctcttaggctgaacaattcgatgctggtgatgaggtcaaaggaaataattcagtaagaatggaaattactggagatactattgtctcagggctttgtactacatgaaacttgacagtggtgtctgtacagtttaactctgatacatttacttggaaatgcacttaattttcaaaaactggagagggtccctgtgtgatacctcagaaaaattcttgtcctaatgcagtgtgtccatcaaatttagtctttattttttcaatttactacaataaatatgaaaggagggagaatcttttttacataaatgccttgcatcatcctccagtcccctcactgggggaaaaaaaaagcatctctcaagtctttgtccaactttggctgctcagaccgatggctggtgacagtcactgcaggggttcaggagtggaggaccttgtgtcaagcagaacacacgtgtctgcatgggtcagttgtgcatgtgcttcctgggtggctgataccactgaaggccagtgtgcaggagcattggggtgactcagggttcagtccagagccaggagtggctgggtgttctcattctctcccttctcctcatgtttcagggtcccagcttctaccacagactgagatctaacaagaggggagggaaaaagacagaattacaaacaattcatggtgacaattttggaacctttgaagacatccggattttatatttctctttttaatagacactcaaaaattaactgggtgcagtggcacatgccagtagtcccagctattcaggaggctgaggtgggaggatcgcttgagtccaggagtttgaggctgcagtgagccatattgtgccactgcactccagcctgggtgacagaggtagaccctgtctccaaaataaaaataagaaataaagacactcaaaataactacataatatattccctttcgtatctctgtttttcttacttcttttgcttgctaaaccacatttttacggcaaaaaagcattttggagtactggaataatctttgcagtgatctcttctcttggtaaaagggacatatgtattctagccacactctgccccagcatctaaatattctgtgtaccttcagatatataaagtttgttgaatttttaatgttttagtgtaccttttaaaccttttgtctctcagagtcattggaaactaccatgcatgatgttaagaccatgaatcagatggtaaagttagactctgtcccttactggctgggaagcttgggggagttcttaaaactctctggaccttgattctctcacctgtatactagaagtattacctacttcccacagttgttgataaagacgactacaactaataatatgcatagagcatttggcatggaattatagttaaaacttatgaagcactcttatgaccaaccactattgcaatactagtaatgatcattagtttttgatgtgtccttttatactggagtaataatgatttttttctaagaagtttataatatgaattaaaccaaattattttccagcttacagagaaaaggttataaaaagagctacgcagtagatatttaataaatgttcacaactaaaaacaaattatcatgaaaatggttaaattgttcaaataagtaaaacttacatatatgtgcagtaaattgttaactcggtagacctggggtgcccaaaccctacacattacaagttttcaagactggcctttggctcctctgagcccttagagtagtctacctgataaggagatctttgtatatctgagacctgacttcatgccaagtagtttatgctaacagtgtgatttatagtgcatgcttggttttgtatgtctgggctttaggtcacactgtatcagtttgacccttttaaggcagtaagagtgtcagaggtgcttgaaccagagcaactccatcttaaataggggctgggtaaaataaggctaaagcctgctgagatgcattcccagaaggttaaggcattcttagtcacagaatgagataggaggttagcaaaagatacagatcataaagtccttgctgataaaacacgttgtagtaaaaaagccagacaaaacccaccgaaaccaagacggcgatgagagtgatttccagccatcttcactgctacactcccaccagcaccatgacagtttacagatgccatagcaacatcaggaagttaacctatatggtctaaaaagcggaggcatgaataatctaccccttgcttagcatataatcaagaaataaccgtaagaatgggcaaccagcagccctcagagctgctctttctatggtgtagacattcttttattcctttactttcttaataaacttgctttcactttactctatggacttcccctgaattctttcttgcatgagatccaagaacccctctcttggggtctgaattgggaccactttctggtaacatctttctgatgaaccatgaagggacaatactgaggaaacccctgacccaaagactaactttgggtaagtaagtggtggggcctggtaacaagagggaatggtggaaggctgaggactgagctgttaaggtcagtcacaaaggtactgcatgcccatgagactgacacccccccccaataaaaacctggacaccagggcacagatgaacctccttggttgacaacactttgcagatgttgtcacacatcattgctaagagaattaagttctgttcatgtgattttactggaaggacaactggaaacttacagctggtccttcctggactcctccttatgcatggctttccattcctgattgcaatctatatccttttctgtagtaaaccacaactgtcagtcttaacaacttttctgtgtcctgtgggtctttctagtaagttaggaagacattatcaaaattatcaaatacagaaaagggtggtcttgaggaccccctcaacacaacatactaaaacactatgtttgtgcatggtattgttctaagaagttcttgacctatattagcttatttcattttcataacccatagttgtatattaacatgtatttacattgacatatattaacatttcattttcacaacccttagttttttccatctaaaaaactaagggactgagaagtcatatgatgtatagaaggcaacacaaatagaaagtggagatgttgacaggtttattaccaacacacagttcctgggtataccaaaggccacagaagcgtttagctaaaacatcgagtgttccttccacctcaccataaaaatcactgttgttttgcctaagattcctgtctcctttcaagatatgtatgtactgtagaaaggataaaattaagaaatcaagaagcaaatcagtacaagtgtctcaaaaaaatttatttctactgtaactatcaatccattcaaacagtccaaccttatataccaagctgaacctttgaaagcaaaatggactcatggactcacttattgctgggatagggcagaggaaggaagctctaggttgtagtttagccccagccccctaacacatttccagtgcatttttctctttgttttagtttaaggcccagtgtgcatgtggggaagggagaagtgtaggtttgtacgaggaacaggaaagcagaaaatccagaggcattaaaacaaacagcaagcatgaagacaaccaagagagcacaaccagagacacaggccaacctccctccagcaccttggacagctgccttcctgctttgacctacggaccctgtggaaaaggaaaatactgatggccatctacttttacagaccttaaactccatttaccttctgtcatatgacttcactttatttcacaacatggcatgagaaccacagccacagagttagagggaaacagtgactcatctagaccaacctgataggaaatcttcagtaaggagttgtgcagcctcttcttgaacataactaacttgaggaacctgctcctccatgcccctaaacagtcaactcagctagaaaattcttccttacattgaactcagctctgccctttctaaacttctatgtacaatttctgattctttctcctggagccaccagagtagacacaagtaccttttagccctgccacacctgcccagccaaggctagccagattcctcttgtgccaaggtttctaaaactggccaccttagcactatcctgtatctcttcatcaactagctgggttgcccatagactcctggtgtgacctcagaataaaataattgcttcactttcttgatttttggtttgttttttgctctgtttgcttctgttgaggcaatttagagttgcattagcctttctggcactgatacaacacaaccaaagggaaatctggctgtatttacacatgctgccatgctgctgttaacaatttctctcccatctcaaaggtacatggttgggtattaaatttcattttcttgaatttgcctcatgtttccaatctatctccatccttttggatcttgaaatttgttacccatccaaatgattatctgggacttttgtgtcttggatctgtttcaaaacttcccctttccctgttttgggagccactatgaaaagaaaatcaaattctcaaataatgagttttttaaaaatcacttattcacacactcacactaagaaagatttgtgaacatctgctgtatgcaacggactatgagcaatgtgccaaaacctttatgcttttgtggaaacactgcttcagttatccagccatagacccacaaacagacttaaaatcattgtgacaggcacccccattacccagtcagaggagaggcagttttggggagggaaggtgttagacatgaaaggaaaggaatgaagaaaaaaattatctttcacacattattcatagttcttattcaggtagccaactttcacttccccctccacattgagtcaaattgggatctacatgatttcttctaatagatgtactggcagcacagacccagaatgcaggctctcttaactctgccaataaactgtgtgccatggttgaatggtgagtagcaataagacaactctgagatagtgaggccgaggaaccaaacataactttttattttcctggtttacattttccctgagtgagaagatgaccatacagtctttttactttcagcatgacataattctagttacctggtcacacaataaacatttgatataagtagcacattatgttatgaagtattttaaattcactggaaaaaattagaaagtaaatgttgcttttcaaaacctctagaaaaaaagaaataaagccaagagatacaaccttttaaatcttgccctcagtatatttggctgattcaaaatgctctcagggaagaccaatcaactgctcactgacaaacatgtctccaccacttctgaacagagtgcttaggaattctgcacttagtacattaactatcgagaagccacttgctttgaggctttgttgtccagatca

SEQ ID NO: 93954 - DNA, 18673 bp, Homo sapiens
ataccaaggatgtggggttagagggggtctggacttccttggggccaacaaaggtgggtaggtgcggctgaaactcgccctggatgccagcaatccccctctgcaaggcagcagtctccgaaccctggcctgcctttctaggtgtgagatcacctcccgggagtactgtgacttcatgaggggctacttccatgaggaggccacgctctgctctcaggtaggtctgcagagtgtccgtcgttcccctcccccagctactgtgatgctgatatgctgctctgcgcaggtgcactgcatggatgatgtgtgtgggctcctgccttttctcaaccccgaggtgcctgaccagttctaccgcctgtggctatccctcttcctgcacgccgggcaagtgacactgtgggccgggtcgggggtctcagggccctcaggattggctggctgggggtggcagaaaggtcacttccctgctgaatgtctcccgacccccgcctgctactgactacaggatcttgcactgcctggtgtccatctgcttccagatgactgtcctgcgggacctggagaagctggcaggctggcaccgcatagccatcatctacctgctgagtggtgtcaccggcaacctggccagtgccatcttcctgccataccgagcagaggtaaggctggccctcagggtggggatcctcccgtgtgcacctgcagcctgctgtgaacctgtccatatcgagcactgagtctgggagcatctccagttggatcctcggtcccaatatgctctgggccatgggaagtggggcagaaagatgaggccttgggtccagggggcctgcccagccccactgccttacagctaccccaaccatcccccaggtgggtcctgctggctcccagttcggcatcctggcctgcctcttcgtggagctcttccagagctggcagatcctggcgcggccctggcgtgccttcttcaagctgctggctgtggtgctcttcctcttcacctttgggctgctgccgtggattgacaactttgcccacatctcggggttcatcagtggcctcttcctctccttcgccttcttgccctacatcagctttggcaagttcgacctgtaccggaaacgctgccagatcatcatctttcaggtggtcttcctgggcctcctggctggcctggtggtcctcttctacgtctatcctgtccgctgtgagtggtgtgagttcctcacctgcatccccttcactgacaagttctgtgagaagtacgaactggacgctcagctccactgagctggctgcgggctccagcggccgtgtgctccagcaggccagagccagacacgacctccctgagcctcacaggcttacaggagtcacctgctccatgtggggactggcctgtttcctgaacacagacctctttcttgtgccttgttcacttctgttgaacccctcgtactgccgggcatttattatactacttcctgtcataaccttctaacttgtttcttgacgaccacctcatgtggccaataaatggactgggagcgttttagctgccattaacttgaccagggcttccctatccttctttgtttctggctggaagctgtggagggaggtcctgcaggccccttgtggctgactcacccgggcagggaactgagtgtcagatacagtcacgggctctttcacttcccagtgaaatccttcagccaggcacgtgcaccttgctctttcttagagtggctggtagccgacgctgggacagggacctagggatgtactgtcataccctccccacatgctgggaagcaccccgcccccacccttagcagctccaatttccaccccacactccctccctgtccaccgaacctgctgcagggaaccctaaaggctgaggctggagggcccacacacagctgtgctatgcttgctgccactgtgagctccaggatgcaaaccctaaagccgctctgcttttatttcctccttgctgtggagatcatggtaacacagttgtgtggtttggggagtggtgtggcctcaaggctttggtggtgtggcgccatcttggactataggactcgcctgtaccaattctctccccttaactcacctctgtgatggggcaatctcagtctttgctacccaggttactgtggctttctacttttcaaactaagaagcaaacaggtttattttatacagtgggccaggccgtgggtctgccatgtgactagggcatttggacctagggagaggtcagtctcaggccaagtacatgaaaggagggagcactggctcaccctgtcctagtcctgagggcccccaggtttatgctgacagttcctgttgggcatgcctggggtgaggccaccacaacgtcctttctgtgaaagaggcacgatgattcgaggacccattcctgctgggaaaaagctcagccaccagtgatgaagagggttgtcctgtctggaggctcacttttgcctcagctttttgatgaaggaaacctcgtctcgattccggatgccgtagctgaaaaagaaggaaaggcataaagcacctgccctacagaaggacatatctgtgactcccctcctgaggctgtggaggaccacgaagaaacaacagaggggaggcgtgtggcttctgggaaggccaggaagtggcagtggccatcctctcacagacccagaagcactccgactcacaagtccccggggcagggaactgagtgtcagatagagtcacagcctttcgcctccatgcccactctgatttcctccctcctggcactgtgtagccctaagctgccactggtgggaagcagcaaggcccctccaggtgccctctgcctgccattctcctagtggggagggccccaaggaagctccttggaggagggtgttatctccggagagggagccgcagccctctggcagagcatgggggactaaggggcaacagaacagcggtgccctacggctcaggacgtggccggcacttactctcggagcttctttctgtcttccgtgagtttctctcctgcagaggtcagatggtacgtcctccacacgtaggacctgcaagaggggaatgcaggtaaaccacgtgccctgagcagggtgagctgagtggctctgcatgacgtgggcttgaggcatgcagtcctatgggacctggggcagctgtcctccctacctgggctgttctgtacaatgtgcagattgggtctgaggcagctacaaggaggctctgttctcagagggctgtctggggcggcttggccaaacaaaccttgctaatgcaacaggcgacagtgttgagactcagtgaacaggatagttgatccaataggagagtgagggctgacagcacccaggtgagaaggggatgggagcccctacaggtgtaccatccaaaactagggaggccacttccagacacactggaaattcccgacagtgtccccaagtgaagatacccagcagctcggatggggtgatgccgatggaagagcagaatgttggggatggccgaggcaggagtcccaggcacagaacgacccgcactgtctgtgacagggagctcatcactcttgtgacagggagctcatcacttcagtggtgctgtactcatgcagagctgagagctgtttccaggtggtgcctggtgacagtgccaagaagggcactagccccacgaagggctataatgaagggaatgttgttccacttaccagctgatgtgctgaatgcccccttcacgctcctgcttgagctgcacgtatctctggatggccttcttcaggtccaggactgtggcactctgcactacaaccacggctgcaaccacggacacagatgggagaagatccatggtgagaacccaaagccacagcctccgatggcaggaaaggaaccaacacctctgtgcacagggcaggtttgtggttgccccagtacccctgggcatggcctgtgagtttctgagcaggctgaccagcactgttaggtcttcctgctgtgaaagcctggaccacataacctgaagggaggagggtagcacttacgcattacttctccatccatcttgcacactcggaccgtcattgcctggccgtattctagggctatttgggagttgacttcttccagagtaacctacaaaagaccaaaggcagaagtgggaaccctggctctctttaccaccttgagcaacaacaaagaacaagccgatagtggccaaaaagtggtgctccattttacgaagggcaaggaagggtggttgcctgtacgttacggtttcccaattcatcagagccccaatctcatgttccactcacattttaatgtccatagtggacagagtctctgggggaaagaggtgctaagaaacaggcaagagaataaactcacatgaggacctgcccccaggggtgggtagaggcctgtcagttcacgctgagtatatccctgatcatcaggacccaggccaggcttcgggactgagtaaggcaggtgtgcaaaatttaccggggcagcaaaacacggtaataacaataaatattttaatacaacatttaagaaatacaaggcaattaaaatatccatgatgagcaaaatataaaacatttaaaattggccgggcgcggtggctcacgcctgtaatcccagcactttgggaggccgaggcgggcggatcatgaggtcaggagatcaagaccatcctggcccaacatggtgaagccccgtctctactaaaaatacaaaaaattagccgggcgtggtggcgcgtgcctgtagtgaacccgggagggggaggttgcagtgagtcgagatggcaccactacactccagcctggcaacggaccaagactcagtctcaaataaataaataaataaataaaaagacagtatcgtcccaaagcatgatactgacgctttgacacatgattgacgcttgaggcaaatggaacaatcagtactactaatcttgctcttatttaaaactaaatttttcttttaccgtaggctctttttttgcctcaactttgacttttaaaggtattacaggccaggcgggtggctcacacctaaatcccagcattttgggaggccgaggcaggaggatcgcctgagcccaggagtttcagatcagcctgggcaacatagtgagactccctctgtacaaaatatttaaaaattagccgggtgtggtagcgcgcacctgtggtcccaattactcgggaggctgaggtgggaggacgccgctgcactccagcccgggcaacgcagcaagaccctgtcccccgagccccctaaatacaattacattaaaatgtcatttgatgtcactcactaatgaggtttttggttcctctttaagcttcgcgccccaggcgagtgcgcccggtcaaggttaaaaccctcgtttacgcccagaggcgccttcctcagccttgggccgcagtctcccaccagcaccttcggaggctgccggcgcccggatgcccggaccccggggaacgactcccgcgcccccagcccccgcccgcacacacctggatcggcagatcgcagagcagcgggtcctgcaccaccatagccagaccctcctggaacacgtccatggcctcggagtgcggcagcgcctcttcttcgtcctcatcttcctcttgcgcctcgggcccacccgcggcctccgtctcctccagggccgcccctctcagccgggctctgcccgcactgccagcccgcactagggaggccaagcgcgcacgcgcaggaactgcggcccgccccagcgaggccgcccagccactggcgcgccggggggggtggggcggctgcagtgaccaatgacaagtgcgagacagcctgcagcagggccgggagcgcagaatcgccctgtctattggttggttggtgtggcgggaaggctgccaggaccaatgtgagctcgaggcgggcggcgcatcggcgctgagcggcagtgggagctgccgggagttggagcctgcggagttcgagaccatgctgctgttctgccccggctgcgggaacgggctgatcgtggaggagggacaacgctgccaccgcttckcctgcaacacgtgcccctacgtgcacaacatcacccgcaaggtgggacccgaaggccggcrctgggccgcgggcgactctcgcaggccttccgcktcctccgactgctgctccatcgccgccagccccggcgtctgcctctgtccgctctttctcgcgcccctttctggtctgcagcagatctgtgggctctactttccaatacactcagaaagccccaccgtttcccaccgccttgggttcctgctcccacgctcgcgcccttctctgcgttcacagcggcggccacggtgatttccttaaagctgaggcacgcaggtccgtgctgtgcgcagaaaccttcggctcttctccagctcacgcagacgaaaagccggagttctcccagggcctaccaggttccgacactgactccctcccctgcgtgcgtctccgatttcaagtcctaatgcccttcctgttgccctttgccgcatcaacaccgcctcctggacgatctctcatcgtgcwcatggtgctagcagggcctttgcacttgctgttgctcagttcactcttcccctagatcgccaccttactcattggtcttgtctttaccgtattttaaatttcagcccctccttccaatttattctccttccctttgtaattgtttccatagggcttattaccttctaatatattatgtaatgtattgtgtgctttctttatttttttttattgttttttttttttttttttttttttttttttgagacggagtcccgctctgtcgcccaggctggagtgcagtggcgcgatctcggctcactgcaagctctgcctcccgggttcacgccactctcctgcctcagcctcccaattagctgggactacaggcgtccgccaccacccctggctgatttttttgtatttttagtagagatggggtttcaccgtgtgttagccaggacggtctcctgacctcgtgatctgcccgcctcggcctcccaaagtgctgggattacaggcgtgagccaccgcgcccgtccttttttttttttttttttttgagacagagtctcgctctgtttcccaggctggagtgcaatggcgtaatctcggctcactgcaacctctgcctcccgggttcaagcaattcttctgcctcggcttcccgagtagctggaattacaggcgcctgccaccatccccggctaatttttgtatttttagtaaagacggggtttcaccgcgctggccaggctggtctcgaactcccaacctcaggtgatccgcttgccttggcctcccaaagtgctgggattataggcgtgagccaccacgcctggccagaatacctttactttttagcagttagaatatgttggtgctacgtcagtcttaatgtttgcatgctactccagtttgtactgtgttgtgggagtttggagtttgaaactacgggaagagtgaactctttgtttttttttttttttgagatggagtcttgctccgtagcccaggctggagtgcagtggtgygatctcggctcactgcaagctccgcctcccaggttcacrccattctcctgcctcagcctcctgagtagctgggactacaggcgcccgccaacacgccgggctaattttttgtatttttagtagagacagggtttcaccgtgttagccaggatggtctcgatctcttgacctcgtgatccgcccgtcttggcctcccaaagtgctgggattacaggtgtcagccaccacgcccagccgagtgaactcttatgtaatcctgaaatttaaggtttggcagcccaggtttgcgctattcagttacttggagtctgaagtgttgtttttgttaggtaacaaatcggaagtacccaaaactgaaagaagtggatgatgtgcttggtggagcagctgcctgggagaatgttgactctactgcaggtaagagggaaaactgtttctgttgctaaactgtggataattatgaggctgttgatgccactgcttggcagagtctatgatgtcatataaatgatgtaggtttctaaaaatagaaaatggttcttgaataatttatttgtatttgttactgtttaataatctgtcagacaagcaatatttgtgccagccttggagtcatacaggcccgggtcagattctcagggcaaccttgtattgttgtaggaccttccttgggtctcttgacttctctggggctaatccatattcgtagacygcgagagcataaagtgaattataccgtgcttggtatataagaggcactcaacaggtgatagctttgataatggcaatgatgagtagattaataaaaataagagtctaaggaaaaaagtatgttctttctgtttgatatggtttggctgtgtctccaccctaatctcatcttgaattatagtttccgtaatccccaggtgtcctgggaggggcccagtgggaggtaattgaatcatgggagcggtttccccccatgctgttctcctgatagtgagtgagttctcacaagatcagatcgttttataagcgtttgcgtttcccctgctcgcactcattctgtctcctgctgctctgtgaagaggttcctttcgccatgattgtaggtttcctgaggcatccccagccacgcagaactgtgagtaaattagacctcttttcttggctgggtgtcgtggctcacgcctgtaaatcccagcagtttgggaggccaaggtaggcagatcacttgaggtcaggagttccagaccagcctggcccgcatggtgaaaccctgtctctattaaagataaaataattagccgggtgtggtggcgctcgcctgtagacccarctgctcaggaggctgaggtacgagaattgcttgaacccaggaggcagaggttgcagtgagccgagatcacactactgcactctagcctcggtgacaagagtgagactctgtctcaaaacaaacaaaaccccttttgtctatataaattacccagtctcaggtattcatagcagtgtgagaacggactaatacacgcttctaatatagatttttagaagttaataccagtgagcattaaactgcagattgggtaaaatacatgtttattgcatgtctggtagacatagatgtggccaggagaggaaaggggaagacgtaaatgtaagttatattgagaggtgagagagataactgatggttagtactgtggttttccccctataaaagaacatataggctgggtgtggtgrctcacgcctgcaatctcagcactttgggaggccgaggcgggcggatcacctgaggtcaggagttcgagaccagcctggctaacacggtgaaaccccrtttctgctaaaaatacaaaaaattagccaggcgtggtggcagcacctgtaatcccagctactcgggaggctgagacaggagaatcgcttgaacccgggaagtggaggttgcagtgagccaagattgcatcattgcactccagcctgggcaacaagaacgaaactctgtcaaaaaaaagaacatacaaatctgctatgtgaaaaagttagcagctggcacggtggctcacacctataatcccagcattttgggaggccaatgtgggcggatcacgaggtcaagacatcgagaccatcctggccaacatggtgaaaccccgtctccactaaaaatacaaaaagtagctgagcgtggtggtgcctgcctgtaatcccagctacttgggaggctgagacaggagaatcgcttgaacctgtgaggcggaggttgtagtgagctgagatcgtgctattgcactctagcccaggcaacaggagcaaaactccgtctcaaaaaaaaaaaaaaaacaaattagccaggctcagtggcgcgtgcctgtagtcctagctactcaggaggctgaggcaggagaattgcttgaaccaggaggcggaggttgcagtgagccgagaccatgccactccagcctgagtgagactgtctaaaaaaaaaaaatctttttacctaatgtcagaaatagagtgtttgaagccatttctgtcaggtgtaggataagtttctcaaagtgaaatcgctttgaagagtgcaatggtgtgatctcggctcactgcaacctccacttcccaggttcaagtgattctccttcctcggcctcatgagtagctgggattacaggcatgcgccaccacgcccagctaattttgtatttttagtagagatggggtttctccatgttgataaggctggtcacgaactcccgacctcaggtgatctgttggcctcagcctcccaaagtgctgggattacaggcctgagccactgtgcctggctttttttttgagatggagtctcttttgcccaggctggagtgtagtggcacgatctctgctcactgcaaacctatgctgcccgggttcaagcgattctcctgcctcagcctccctagtagctgggattacaggcacctgccaccacgcccggctaatttttgtagttttggtagagacggggtttcaccatcttggctaggctggtcttgacctcccgacctcgtgatccacctgcctcagcctcccaaagttctgggattacaggcaagagccaccatacccggcctcttcttttcagcccacaccagaatcgcccttaatgctcaattcttttttttttttgagatggagtctcactctgttgcccaagctggagtgcagtggcgcgatctcggctcactgcaagctccgcctcccgggttcacgcaattctcttgcctcagcctcccgagtagctgggactgcaggcacccgccaccacgcctggctaattttttgtgtttttagtagagacggggtttcaccatgttagccaggatggtctcgatctcctgacctcgtgatccgcctgccttggcctcccaaagtcctgggattacaggcgtgagccaccgcgcccggcccttaatgctcaattcttgacaatgcaggcttttcccagcatttacttcaaaactcttccaccatctaaccattacttagtcttaggcattttgttacagcagcacaaaatggaccaaaacagtcaccttccatgttacgtttccaaccagccttcagctggatttgagaagaaccatgggactcagggaggggagggggagagtgtgtgagtcacaggtctcccagattcccttagtgttacagcgtggtgggaatgacatcactgtttgtagatctacccttgtcaagggggatcaaatgagcagggaggttctttaccatctttaaagatattaagtagtctgggcacggtggctcatgcctgtaatcccagcactttgggaggttgaggtgggcggatcatgaggtcaggagttcgagaccagcctggccaacatagtgaaaacctgtctctactaaaaatacaaaaaaattagccgggtgtggtggcgggcaactgtaatcccagctacttgggaggctgaggcaaggagaatcacatgaacccgggaggcagaggttgcagtgagctgagatcgccccactgcactccagcctgggtgactgcgagattccatctcaaaaaaaaaaaaaaaagatattatagtaatacctactttttttttttttttttttttttgagtgcagtggcacgatcttggctcactgcaatctctgcctcctgggttcaagcgattctcctgcctcagcctcccaagtagctgggattaaaggcgcccgccaccacgcctggctaattttgtatttttagtagagatggggtttcaccatgttggccaggatggtctcgaactcctgacctcaggtgatccgcccgccttggcctcccacatattaagtaatacctacttttgacagycatgagtagcatctttttttaaatgtggtcacttcttttttctcattgccagagtcgtgtcccaaatgcgaacatcctcgtgcttacttcatgcagcttcagacccgctctgcagatgagccgatgaccaccttctacaagtgctgcaatgctcagtgtggacaccgctggagggattagggccaggatggcccagctgccctagtgtgtgcttgccttgtccctcggggtagatgcttagctggcagtatgagtygtgtgtcctgagggtctttgctagtgtggtggaaagataaaccttttgaggtgaagagccagggggtcaggaaatatggcctatctgccaggcagggtggatgaagtcrtgaatgtctgggagtttttctgtgtggggaggagacagagacccataactaaatatgctctgtgtaaagtcctattctttcatcttccactttattggcagttgacattcccttactcccaatcaacactcttaaatatttgtactgtttgtaaaacttagtacatgtccctaaatatttaactgttacttgtaaacttgtgtaatttattatttattttaatcaaaattctgaatatttcatttaaatgaaagttgsaatattgccttctcagtgttttaaatagcttaagaggtagaaagcaaaccccaaatcacagtgatcccagaatagactacatacttacatttgaacaggctacgaaaatgttaatcaccgggatttcaatttctttctttattcctattcttactcccttattcatttttttgaacctcccctgatttgcttcctcgggttgctttaaatgtataagatactatttatttatttatttattttatttatttatttatttatttaagacagagtcttgttctgtcgcccaggctggagtgcagtggtacgaattcagctcactgcaacctctgccttccgggttcaagggattctcctgtctcagcctcccaagcagctgggactacaggcatgcaccaccacacctgggtaattttgcatttttagtagagatggggtttctccatgttggtcgggctggtctccaactcctgacctcagataatctgtctgcctcggcctcctaaagtgctgggattacaggcgtgagccactgtgtcccaccaatctttacatttaatatgactattttcttattgtttgaacatgttgatcagttcctgatcacaatatggggcctatcctatatgggtcctagagtggttggattttattttttaacctaaacacagaccctaggtttgaaagggtgtactgggtctgttagacttataggcattttttttttttttaatacttagccatgcatctcttgcattgtcactcctttaggagtgcatctgtcttctaagggttagctctcctaactcttttaaatcccctctaatttgattaatgattgggggcagccttctgaacaatatttcacgggacgaatacccagtttgtttggtgggggtgtacctgacttggaggaggaccatgggcgagacccgatcttattttagatgagtttcttgacaaaattttttcagcagctgtttgagtgtctggttcgtgcactgtacttgagctctgtggcctgtaggatgtacgcaatttccactttatttttaatagtctagttaagtcctgaactcttgcagccacaaatgttggtccattgtctgatctcagaggcagtccaaatctgggaataacgtctcctaacaacacctgagtcacttctagtgccttctctgtccagatggagaaggcctcgacttatcctgaaaaggtgcaaatgaacacccacatgcactgatagcccccctttcagggcaatttggcgaagtccataagcagcttttcacagggcatggctggctcatgtttcctgaactcctgggggccaagcaggcccttgttatggattgttctgaacacaagttaaacactgtttgtttacaaatggcttgagtaatagcagcgagccatggcacatagaaatgatgccttaataatgtctttagtgctgtttgttttttttcccatgtgagttccttggtggaactgttctacaaatcggggtcaccatttcaggtatggcctcccattggagaattttaccgtcctccttcaatgtagttcttatttttctgggcaaaccaagcccttttatttgcaggggtgcttgggatctctgggagggaatctccgggaggagaggcatagctgaggcctcctctttagaaggtggagttgtcactgcagcctgctttgcctttttgcctttctattttttttagcctttggtgttcttgcttttcggtgcctctcgcagggcatcatggccacctcttttggggctcatacagcatctaagagctgcaaaatttcttccttgtgcttttttttttttttactttcagtagttaaaaggcttttttttttttttttttttgtaaatagcctcatgaacatgcaaagtggcagaagcatatttggaatctttgtaaatatttgtcttttggtcttttcctagccagggagttcttgtcagagctatcagctctgatttctaagcagaagtttctgtaggcaaagactgcacctttactactgagtccgaagtcaccactgcgtacccagcttggtggactccctttagtatgaaattgcttccatcagtagagtattcaatgtctgagtccccgaggggccgatctggtacatctctctggcttgagaacactttatctaccaagtccacacagcaatgaagggggcctcttggcactgacttgatgaggagcagtgtagcttggtttagggtatttagtctctaaagtcagtttattagctttttccacgactgcattcacgcccgcgtccatgccttcttgcaaagctagcttctcttcctgtaagcgctgctgctagtaaattagcctttcttaagcctctgatcagcctcctgatctccgttaatgtacaccttggtagccactttaataagctgagtagcattcacgcctgcggagcttccaacttctgtaatttatgcccgatatctccttgggcctgccttacaaatgtcgtattcaccatgtgctgattttcagcagcctcagggttaaacggagtgtacaaccaaaatgccttacgaagtctattataaaactgactggtgcttttatttgcaccctggagaacctctgagattttgtgtgtgtgtgtgtgtgtgtgtgtgtgtgtttttagacggagtctcgctctgtcgcccaggctggagtgcagtggcgcgatcttggctcactgccagctctgcctcccgggttcacgccattctcctgcctcagcctcctgagtagctgggactacaggcgcccgccgccacgcccggctaatttttttgtatttttttagtagagacgggttttcaccgtgttagccaggatggtctcgatctcctgaccttgcgatccgcccacctcggcctcccaaagtgctgggattacaggtgtgagccaccatgcccggcctgtcctctgagattttttatattggttgcctttctcttttaccttcctttagcctttgcagaaatgtttcttggcacctttgtaggtgctgaagctgggctgcatcatcggatcctggtgggggttctcttgtcctctgaagaggcgtaagtttaacttgggcatggccgggcctgagacggcctgcctgactttttgagcctttcactttaacttcccggagctctgatttctccctctcaggtgagactgggagcatgtatctgtttgaacttgactccttaggtgcagttagccttggtaaaggggggcagattggaatatagggaggggtggtctctattccctcctgtggttcttgcagaacggtttttctctttcttttctgagacttttcattcgtccccatagcttccagggcagctgatttttacttttgcttttggctcagtggtgctacaagcctctgtgactttccctttaactctgtagctgccagcgcagctgatttctctcttggcgtgggctgtgacgttctacaataaactgctaggcagggctgcattcacttagccatgagtcaataccattgcctttggcttccctatctccagggtcacattccctttaggtgtaaaggaaatttgtgcctgcagtttttggagcaagtctctcctcaacaagggcactgaagaatttggcatatatagaaactcatgctgcacttcttgtcctccaataacacatctcctgtatttggaaaaaggtgtcacgtctttggccctagtagctcccatgatagcagcatagttctttttgtgggtgctaattgggcgagttaccacagagaaatcagcaccagtattgaccaaaagatccattaattggcccccttcttccatagagaccacaggctccctggggcctaaaaagatggagcccagtctgtctcagtcctcaaaattctcagcccccgctaagccagtcagatcaggatctgcctttgaagcactatgaccagcaactgaatgccacacttgggtgttagaccattgaccatcatctccatccgtttccttttggggacactcatgtttccagtggcccatttgtctgcaccttgcacattggttcctgtccagccgggaccagcttcctctccctgtcttgtctgccctcttccttggcctcttccttggccacaccctctagcaaatccagggttactttcttgctagtgcgtcagctatacactgagccatctctttgtttctatttttggtttttcttttttcctttggttgggctgcctgggccactgatgccttgtaatatccctctaggcagggctgtagccacctggggcaagtttgtgccacactgagccaagtgtccatacagggaaactggtctgggtatcctggttgtcctccaactccaatgaccaccttaaacacacggccaattaattccctgtctattgtagcttcagagggtcaccccacattgaaagcagaccaatctatttcacagtatgtccttaacttttgagcatccaatttcatcccataatcacctctaaatccttttttaaagttctttatcatgcacttcaaaggagttggtttagacacttcccctcccatttcctcccttgtggcacactctcactcactttcactcttgggtccaccagacctggtcctggagtttcggacgctgcttagccaggaatgtgccttcccctctcacagcctgctgcggctgtagagctggtcttatctgccatatgcaacgtcctacgtctgatttcacccgcactcgcctcggagcacacagcctgcactaagggatctgtgcttccccatgtcactccctgcattggcctctcccgagaccgtctctttcacacactttcacacacctcctttgccccaggactccttattggaggaaacgagcctctctcgtgtcccgggtgagcctagttaggctcctacattcacacacatacacacaccactcctaccccaggactccttattggaggaaactagcctctctcatgtcccgggtaggttcacacacacccacacactcccagtcgctgtctgcagatccagtgaaccactttcactttgttagtggggacgcgaggttcatccaaattggcaggccactcctgccgcccccagctgctctgggttggattagtggttggtccctgggaggtgatcaagctcgcattcatccctgtgggacaggctttcctgccttggtccttgtctgcttacttaccttactccttaccatggttcccgaagtgctggtatcatcctacagccccatccctggttccgttgcgctgccggacagggcgccgggacgtggggagtgccggcttctatccgggtgaagctcccccgtggtgcaccttggatgctgggtctcccctggccctggggctctagtgccgcaggcaaaggagaaagtaaatctgtcgtctccaatcccggatgaacccccagaaatgtttcgggattgataaggaatcagagagactgatggggttgaggaggatatttattatttaggagcaccagcccagtcggattaacatccaaaggactgagccctgagcaaagagttaccttttaagtattttgtggggtggtgggagatctgtgcagggagaagcatattacagaagtgagaaacgaaggtagttatttaattaattgagacatgcattacatcatttctcacttttcaaagaaaaacatgttttgcgacttgagtttatctgtctagtgaccttgcagctgcacggctagagaagcagggtcttcacgatgcctgggaaaggaggagagataaggctcactagccacggaaaaacaggcagtcaatttttaaaggactccagctctttctctttctcaggggaactgggttttcttacatacaactgagtttctgcttacacattctttaatttcttttaattcctgttccaacgcaatcccagctcactgcagcctggacctcctgggctcaagcgatcctcccacctcagcctcccgag

SEQ ID NO: 93955 - DNA, 38704 bp, Homo sapiens
  misc_feature (1)...(38704): n = A,T,C or G
aatacagcaatttcctggtgactgcattgtgcaagtaatttactaacttgctagagatatagaaatagcattttaacaacagatgtctaagcaaagaactaaattcatatgagtctttcttagaaaaaagtgacatcagctgggtgtggtggctcatgcctgtaatccccagcactttgggtggctgaggtggaaggatcacttaagctcaggagtccaagaccagcctgggcaacataccgagacctcctctctactaaaaataaaaaaaaatcaaccaggcattgtggcacacacgattgtgtcactgtactccagcctgggggatagaggagattgtctggaaaaaaaaaaaaaaaagtgacatgagtcaaaaaaaaaaaagtcattccccaaattgcgatttgttttttctttatttagagcagttataccctctatttttttttttgagacagagtctcactctgtcgcccaggctgcagtgcagtggcrccatctctgctcactgcaagctccacctcccaggttcacgccattctcctgcctcagcctcccgagtagctgagactacaggcgcccgccaccacacccagctaattttttgcatatttagtagagacggggtttcaccatgttagccagaatggtctggatctcctgaccttgtgatccaccggcctcggactcccaaagtgctgggattgcaggtggtgtaagccaccgtgcctggccccctctattttaaataaaaagctagaaaaattatagagaaagaattacattgttcaattttttcttttaaaagaataaaagccctacccaaaaagccctatacataaccctccaatagcattcaaccaattccaagctgaagtccaaattcctatgaatgacatccaagccaggcatgatctggccccagcctcacactctggaagcaaccacacagccgtgaatctctgaacatcctatgctgattcacactctacgcctttatacttacagttccctctgccagataatgcttctattttgtatattctatcatgttatcacactgtgttatgaccgtactgagaatttctcccctagaatacaagcaacttgagggctggagtaatcttttcaactctaattctccagtcccaatcagtaattctgcatgctcaaaaaaggcttgttgaatgaataaatgaacactacctgcctaccggagctcctcaaaggaaggctatccggagaatgatcaaaagatgcttttttctttgtcctcccccgtggagttgccattacattaaataatctgcaaaagaaaaatcagaccattaaatattagcatctgcaaatatttttaacagtctggagcaagttattatacactttggtaggtaagaatgtatgtcagattgcctaaatacaaagctacagttttctttcttttcttttgagacattcttgccatgttgcccagactagcctggaactcctgggctcaagcgattctcccacctcagctccaagtagttgggaatacaggtgcacgtcaccacaccacctggctcaagccaccattttcaagttcttaacctctctaagcctcagtgttctcacacataaaatgggcaccataagcatttactatagcactggcatgaagtttaaacaagataacctatttaaagcaccaaaactggcatatcgtaagtactcaataaacattacctattagtagttatgcacattaaaagatacaaaatgagaaacatgccacatgaatgaccaataaacaaaccacactatgtttataaaattcaatgaggaaaaccacctagttttgcctatgttcctctccattttactgtgtcttcttagcagttcctgcactttgatctcttattacactttaaaaagaaaactcatggctgggcacagtggttcatgcttgtaatcccagcactttgcaaggcccaggcaggcggatcatgaggtcaggagttcgagaccagtctgaccaacattgtgaaaccccgtctgtactaaaaatacaaaaattagccaggcatggaggcgcgtgcctgtaattccagctactcaggaggctggggcaggagaatcgcctgaaccagggaggcggaggttgcagtgagccgagattgtgctactgcactccagcctgggcaacagagcaagactccatctcaaaaaaaataaaagaaaactcattcattccttttcagtacaactcaacaaataaatatcaagaaaaccatctagtcactactgaatatacagatctaaattagatagaagcactggtatcttctactggaaaaaatttcccaaactagtccaataacagcatggttaaacatatattaagaaccaaagtctacaagagaaataatgtgtagcagctatgaaagattaagagctaacagaatttttttcaattagattaaggaatgaaaaatgcttagcataagtactcagtaatatacagaatctataattatcattcatctccttccttgatctattggatttaactacacatacacacagaaaatgataaatgaaaaataaataggacatacctatggataaagaatttgaaagtggaaaagtggaaccataaaatacaaattccagatatataatcttagtcttggagaaaagctttaaggagcttgtaatcctattgtttcatatttgtgagctgtattaacattcataagagtacttttcatggattattaacatcctatggaaaaactcattttgccatctacattgactttgacacatcctaacatcaatgttacggatgattttcctttgactttttttttttttttttttttgtgaaggagtctcactctatcgcccggcctcctttgacttaatcttcactttctcagaaacaataaatattatgttagctgtgaacacataatccctacatattctgaaatgcactatagttctttaagcattaaataaactgccatttagttctacaacatctatcatactgttggagaaaatgctaatgatgttcaaagtactatccaccggccagcgcggtggctcacgcctgtaatcccagcactttgggaggctgaggtgggcggatcacgacatcaggagatcgagaccatcctggctaacacggtgaaaccccatctctcctaaaaatacaaaaaaattagccgggggtggtggcgggcacctgtagtcccagctattcgggaggctgaggcaggagaatggcatgaaccccgcaggcggagcttgcagtgagccgagatcacaccactgcactccagcctcggcaacagagtgagactccatctcaaaaaaaaaaaaaaaaaaaaaaggactatctacctataattgttatacccaaagaaggctttttggactttattttcaaaaggctgtccactccaacaaatctcttcatagacacatataaatattaattattatatacataaatatacaaatctcttcatttatatataaaatatacctgacattattcataacatgaaccacaaatatatgtaaatatatagtatttgtaaatgtatagtatatgtaagtattatagcaaaaatatctgaagtcaaatgtgtggtttaggaacataaatgaatcagcctaggttcatgcaacatttgaccctgtcacctgggaaggtatgcattctcaaaagaaagtatagtttcctgaaatttcatcaaacattttaatctaactgaatactagaaaataggtacttaatgcaacaaagaattcaagaaatggttaacaaggaaatgaaaacatgagctataaaagccattattaaatcttatcgagggtttttatgatagcatattttcaactttatacaattgagggttatatgaatccattctcagaacttttggcacttgatgtaatttatatatctccacttgctgggtccttaggtcttaaaatgaagaaaaaatttttagtatactaaaatgtcttccttcttgatttttcaaattaataaacacacctaaatataaccaattggtttcatgctcaacattatacatatatttctaatttttaattcaagcatttaaaatttggctttggttttcttttaatgtgataaaaaagtgggattttttggtaaatatataagtggatatatcaatatgtagatttcattataataatccctaggtttttctgaagcagcttattcaaaaagattttttcttttttttgagacggagtcttcctccgtggctcaggctggagtacagtggtgcgatctcggctcactacaacatccacctcctgggttcaagcgattcttctgcctcagcctcccgagtagctgggattacaggtgtgtgccaccacgtccggctaatttttgtatttttagtagagaccaggtttcaccaccttggccaggctggtcttgaagtactcctgacctcaagtgatcgcccacctcggcctcccaatattgaataattcaatattgaattattcaatattcaacatgcagttcaatgattcaatattaaatccccaattgcctagatatcttttgttgattctcccagcaaggcaaataattattgatggtaattttctcatgtacctcctgaagaagccttctctcccactcgcctttctgccactaaaatagatttaaaaacacaaaacaaaactggtcaaagccttgagttatgtgtgtatacgtggtgtgggggattccccaactggagtggactggggagtcctgcaggcttacccaagggaagactggacttctatgtggctggtttccacatcactgaaccccaactttctacagctgggtcggcctcttccttcctctttcacctgtcagctgcccggccgttgactaacagctaccctaatcgggccacccctcctccaggtctccaatcccagaggagttaccccagcaacctggcaatgctcatcaagtctcaacgcgtggtggctgtgccagagaattactacaacacctgcaaggctgtgcgggctcctggccgcaccctatcggccgggaagaacaagcgagggagttcctactccaggaccgtggggttctcccgcggctctgacagtccccaggagggagccccaaactcccggtgccagctgcagccgcctcgctttccgagaagctttcggaagcttttcgaagtcggagaagcaactgccccggggctcacctttgcgctgaagaggtgccgggagtctcggggaaaaggcaccgctgtacagaaaggaaacattgtaggggggttagccgaccggcaacatcgcgacgaacccggcgaccccacgccccaacaccctagcccgggaattcccccttcttcagacagatacccaccccgcaccctcttttaatccggggcaggaggtatccgtccctggggcacccgcccacctcccaccacggcgaggggcgctgcacagggggaaagggagggcttgcaccccaaccaagctgctttgtgcaacgctgtcacccgaaatccgccacggcccccacgcacgcccccggagtggggagcctcccacctctgagcgccagcgaggcggtgcgcgccgccctggactgcgggcgcctctccggagccgcgcgccgcgcgcacaggacggctgcagccgcgccgcgagccccagcctcttctcggccgccgccgccgccgccgcttccgcccctgtcacggcgtgacccggggtgggaggagccgacaggactagggatgggtagggtccccgccttcgctttagccgcagcgctcgctccgccctgcccatttccgccgctgcgcaaaccccggcgcttggggaagtgggtggagtctgtgcaacgaggtacggggcgggagtggagacggggcgccgggagagggggcgggaactgaggcggggcgcgggaaagaggcggggcgcgggaaagaggcggggcgcgggcggaggcggggcgcggagaagtggcggaggtggaagcggaggcgtacccgcccctggggacgtcattggtggcggaggcaatggccggcaaccagctgtaagcgaggtaggctcactcgggcgcggagggtgcgggtgagaaagggaacgatttgctaggagtgtatgcgcccgtgctagggctcccaggaattcttacaagcgtagacagcctagcaatcagccctgtgaagtggggttcagggcagaagcggaaactgggaataacgaggtcggacagtaaatgacctgaatccaatgtccaggatttaaagtgcttccaaagcactggtgtgttttaattatttttttttcttttttcttttagagacagggtctccctctgtcgcccatgctagcgtgcagtggcacaatcatagctcactgtaacctggaactcctgggctcaagtgatcttcccgccccagcctcctcrgtaactgggactacaggctcgctgcaccacgcttggctaatttttcaaatttttttttatagaaacggactctcggttttttccccagcctggtgtattagtgatttttgggaaaaaataagtactgccaaatagtgagtgatccctggtgatgtgggaaactggggtgctgtaaatattctgtcttgctctgcggtggttacacaggtgtatgtatatgtaaaaaattcaccgagtcatactcttttaagatgtgtgcaccttaggaaagtttcttctcaattttatgaaatttaaaaacaaaactatagcagaagcttttgaaaaggtgagaatggagactagaacaacttgaggactttgtttgtgggcagaaattwttgtgaaatttcccttccttaattcttgtaatgtgcactttttttgtattatagaaataaactttatttctctagaaatgatgtatacaagtggagtccatgctgagaaactgttagaacagctaagacgttgagcccaggagtttgagaccagcctgggtaacatagcaagaccctgtctctacaaaatatttaaaaattagccaggcatggtggtgcacccttatagtcccaggtactcaggaggttgaagtgagaggatcgcttgagccccagtgttggagacggaagtgtcattacaccactgcactccagcctgggggatagagagagaccctgtctcaaaaacaaacaactaagacatgattaagttatgtgcatgattttgttagacagttcaagtttgtgtgaaaggaatagagttgtgctactccaggctgctgtggaactctgataaagattatgcttctcttttaagtagagaactgctttatgaagccttgaatttaggttccagagtttctgaatgaaaatgagaaaactgcaacattcttttgcttttctgtacccaatataaatcagatactttctactgacctctcagaaaactcagagtcacctcctgataccatcagggtcttgcagaagccatttgtcaacaaatatttgctaagaagtgaattcatgttcccaggtaatgagagaaatgcctcctccctatatcctaagcatactgaggccaaatttggcaacaaaaggggaaatttgcctgaaatacatgcttttatgcaatgtttgctatttcacagattaatcattaaattagaaccaccaataatagcatgctagtataatccaaactagtttcactaatgatttaaagggaatgttagaataatggtgttatattgtccttaatattgcagagttgacattgaaaggaaaggcattttcctcatacattcagatggatctgcagttatggtctgtcagctgaagaatgagaagttcataatttagaaaggagaactctttctcatgaatggtttcagactgtagagcagccattctgactggctgagaagtgtagccgcaggccagaagccagaaactgacacttccagggaggggcaaagggaacaggaatttatgctgaggaaggtggccaaatatacatattcagtwagctgtaggatgactcatgaatatttatgaaaggaggaaagtacccatgagtaattgagcttcatgggtaccatgcacaaaaaatggcggtgttaccacaatcacaggatggagtttttggccctcttatatcaaaaggtgaagcagaggacagaaaaacccttactgtgcattctcagtagactggccagaaccattctgtggtctgtgatctcttatcaggcacaaaaggaggggcagcatcagggggttggttgatatcagtggtagaatcttttgaaagggctggtttcccttaagyccttatagaacaaagcctaattgtggttagcaagagaggaggtatagagttgtatctgacgctctatctactcttggcccagaactcagttttcaaggttactctggggtcccgttagccaagaaagtgtgtagtgagccaagatcgcaccactgcactccagcctgggcaacaagagcgaaactccatctcaaaaaaaaaaaaaagaaagaaagaaaaggaaagaaagtgtgccttcagtcagttgagaggctttgaattttattgttagtttacattgtacatgtcttttttcagtttccttagtgtgcatttcccatgcaaaaaaagaagctgtagaaaattatttgaaaatacaaatgtgtggagtagagataggatattgaactatggttcagtatctactttaatctgtttttgctgtctcctgaaaataacagaatttttttttaaggcataaagtactaggatagccaggacaggagagacaaaattagtaaaattttggaaaggcaaatggacaagtgggaaaggattttgcaacttcaaggaagctgaattctaaaccagcaatgagaaaagccattgagcagcccagtttgcaatacagaatccccaaatgctcaggattagcagcaccaggtacctccataaagtgtgagagtatggttgaaacaaggaggattgcttgaaatgctggttcagaacaggccaaatccccagatccttttctcaacttcttgcaaccaagtgtgtacatctcaccacaccagcaggctttggggatttattctctggaaagggtaaaacaaagagtgtctgtctagactgagaagatatgatacacagttgagcatgggagtatacaggaaacgtgaggattaattgaatacagcaaactggatgctgggaccctcgcccacttctcttcttttcttatatgagtatatgacagtggctccaacgacagaatccttaagacaggaattgggagatccatctatggaaagtctgactaccacaaggaaattaaagacattagccaggcatgagggtgtgcagctgcagtcccagatactttaaaggctgaggcgggaggatcacttgagcccagaagtttgaggctgtattgtgccactgcactacagcctgggtgacagagcgagaccctgcctcaaataaataaataaataaataaataaataaataaataaataaataaatctaggtttccaaatgaaatccactcacatcaccctacattataagccccacccacattctttgccttcattcattttatacctattcttttttttgtttttttcttaagacaaggtcttgatctgtagcccaggctggagtgcagtggcaccatcatagctcactgcagcctcgaactcctaggctcaagccatcctcctgcctcagcctcctgagtagctaagattacaggcatgcaccaccatgcctggccaattttaaaactgcttttgtagagatggagtctcactatgttgcccaagctagtctcaaactccaggcgtcaagccatcctcccactttggtcgcccaaagcactgggtgattgatagcaaaaaaaaaaaaaaaaagagagaagaagttaaaaaaatgagaattaaggtaaatctttcagaaaatagtacaaaaacatgaagatatagaaaaatagaaaaaaatgagaaatttaccataccgggtcagaagattctagagacaaataataggggtcccagaaggagaaataaaaaaagcagagggatggccaggctcagtggcccacgcctggaatcccagcactttgggaagccgaggctggtgaatcacatgaggccaggagttcaagaccagcctggccaacatggtcaaatctcatctctattaaaaacacaaaaattagctggacctggtagtgcatgcctgtaatcccagctactcaggaggctgaggtgggcgtgattcttcactaaacctttagggtgcccaaccccctatggcccccacacttctaaccaagaatttgatacccagcagagctatgcatcaaggatgaggaatagtctaaccgtgttttatacatgcaaaatggaaaaacattctttttcttccttgtgctctttcaggaagctctggaggttaggcttcaccaatataagcgtggtcactaaaaaataacaacaaaaaaaagaggaagacatgaaataaagctggagattcagacaagaaggaaatctccagaatgatgatgaagagcgatcccagaaagctagctgtctaccaagattagagaataatcagggcagattccaggagagaattctccaagatgatattgatagtatagctgatgactggagagactgactgtgtactgataggaaattgggacaattggcagaatttagagttgaattaggagtaagtacaataatgcctacgtgatgaagcctacataaaaacccaagaggatggggtttggagagcctcctaatasctcaacaggtgaaggtcctgtagctaacacatctcttcaagtatattcttcgcagtatcctttataataaatgtgcaaagataactaagtatttctctgaggtttgtgagttgctctagcaaattaagcaaacccaaagtggagggtgtgggaaccccaacttgaagccagtggaggcctggacttgcaactggtgtctaagtgaggaggkaaatcttagggactgagcccccaacatatagaatctgacactatctccaggtaggtaatgtcagaattaaatcagaagatacccaactggtgtccaatatttggtgtgctgggggaagaacccccacatttggtcacagaaatcttgtgtgttgatgattggggtgtgagagcagaggaaacactaatattaagatagaattcagtttatttaatgatctcttgtaatgtgtattaaggggtattattctaccaccagacgcactgaaagtaattttttgttatcacttcttattggatgttgaaatggcaaggtgcagtgactcacacttgtaatcccagtgctttgcgaggccaagacagaaggatcccttgagcccaggcgttctttgttgtctggacaacaaaatgagaaccatctctattaaaaaatatatatatacaaaaattaaccaggtgtggtggtgtgtacctgaagtcccagctacttgggaggctgaaatgggaggatcgcttgagcccaggaggttgaagcttgcagtaagccagggtctccagcctgggtgacagagcaagaccttgtctctgaaaaaaaaaaaaacaaggaaagaaagattagctgggcatgatggtgcacacctgcagtcccagctacttgggaggctgaggcagcagaattgcttgaacctgggaggcagaggttgcagtgagccaagatcacactactgtaccccaggctgggagacagagtgagactccatctcaaaaataaaaccaaaaataaaaaaagaaagaaatatttttaaaaagtcatactgctaagaataataggttttcatttagttcatcaatagaattccaatgaccttaaatgacaacattgcaaatattttccacgtaggcacggaagacatatgcttgtgagacaaaggtgtctctgaaactatggatggtacaagaacttcacttgacattgaagagtactcggatactgaggtacagaaaaaccaagtactaactctggaagaatggcaagacaagtgggtgaacggcaagactgcttttcatcaggaacaaggacatcagtaagaaatatttggtatacaatagagaaatgttctatcaaaaagtgactttgagatagaaataataaaagtacacattatttgactaacttttaggatgcacatttaattctwcacatttttgtgtctcccgagtcacagtgcatctgtggcatgatgtagtttaattggcagagtcttttcttcccacagtgtgtaaataatggtgtggcttacaaatgatgacatcttagatttataaaatatgttctttgatccctacggcacctatgtattggccctgaatatttatacctacaacaggtgctcaagcaatgtttatgcttacaattcttcatactgaaaatcagtggtgtctgactttgctttccaataggatgtgttcagatgttaaagaattatctctatggtgggagaaaagaagttgcgagaaattataaagtgagttaggatgttgtgcaatgtagtagtagtcttcatagcagcaataaatcatgggaccagtgctgagtaaagtggwtgttagagacattccttgttctgggcagccacgcccatctccccaggagatgacatcatcatcatcatcatcatcataccagaaacactgggttatttctgtcatgtggatggccttagaagagccacatctccacagagggaattacaagaaactacaggagttacacttctcaggtttacttcygaggcttgagtacacgtttagagaacgtaccatgaaattaatgttgaaaaatccatggctccagaggctccatcacccccaaaatagtacatatttagagaattaataaagaattttcwaaacatccccaagaaaaaaaaattatttttaattactaatcaggaaagccctgggtgtaagtcagatttaccactgactgggtgtgtgtctgagcaagttacctgtttcttcatatgtaagctggagattataataattaatagkawctgcttattaaggttgttgggaatattaagtgagataatgaatgaaaagtgttcacctaccatacaattgtcctaaaacctttttttttttcctcttcaggctattaaagaagcatttagatactttccttaaaggcaagagtggactgagggtattttttcctctttgcggaaaagcggttgagatgaaatggtatgagcagataaacattaacagaattatcttgycttaatgatgaattctttgggtgatttaacaggatgtgagttttaaaactccattttcaggaaatacacagaaattccttatttttctattagtgatgggtatataattggaaataatattctcaaacagtaagaaacaacagaaacaggtatgaagtctttctggattgagttttgaaattaaaaaatcagtttggagccaatggggggagaaaaaacagccttcccttttacatttyctggatccttgtatgtggttcagtttttgtaggtggtttaggaatttagctaagttaatttttagatatttgaaatggtggtggacagagaaattcaaaatgaattacagctttttggcaggacaatgttcatagtccacagttcagctcaaccttcccctcccaccagggaacacaggagtttctgttatcgtgaatcattgttataaaaccagtgattaagaaagtatttcttgtgagtaattctctacaaagagaattcactttaacaagccacttttactatgagttaccctaaagtcacctcgacatcattctctatactgaactctcttgtaatgataatatacagatacaatcatacctgccaagatatgcatttatttataagcttgaatgttgagaactttgaccactgagcaggaaagaaaaaagaatgtatgaaaaggttagtaaatgcgccaggtgtggtggcctccgcctgtaatcccagcactttgggaggccaagacagaaggatctcttgagcccaggaatttgagaccagtctggacaacatagaccctgcctcaaaaaataaatttaaaataaaagtattaataaatgtaaaatataataacctaaaaaatggtctattctgaatataaatatcggtgactaacgcagagtatgcatgcattttttgggagttgattttcaagtagagatgatagaatttttgcagccagcaaccaatcaactgtagctgagagcctttgttagagggctgctatgactttaagattcaagtgtggtcatgaaattgagaatatttaaactatattatgacatatattttaaccaattcattgagccagaagagatagttactttcaaaattaccctcaaaaaaaattaactctataaacagattgtcatgtgatgtcaccataaatggtaacaatgtagtacaaacaggttctgaggcaacattaggaaaatggtatgaaatagccaattaaatgtgattgttgaatatttggggtctaaagccatttgtaataaagacattmcaaaaaatatcagaactggccaggtgcggtggctcacacctttaattaggtgagcggatcacttgaggtcaggagttcgagaccagcctggccaacatggtgaaaacccatctctactaaaaatacaaaaattagccaggcatggcagcgtacgcttgtaatcccaactacctgagaagctgaagcaggagaattgcttgaatccaggaggcggaggttgcaatgagcccatgcactccagcctaggtgacagagtgagactctgtctccaaaaaatatatatatatgtatatatacgtaaatacagttatttttatgtatatatatatatgaactgagctactgtaattacatgtaagaagttaagaagttatgatagtagatgatttttcatttatgtaactgatctatgtattgaggtctatacagacatgagatgtgaatagaaaaactgaccatgagctaaggccaaaaagcattaaaacaaaatgtttaagatatttaggtttaggtttttggttttttgagacagtcccactctgtcacccagggtggagtgcagtggcatgatcatagctcactgcaaccttgaactcctgggctcaagagatcctccctcccaacatgctgggataacaggcataagccaccacacttggtcttattttgtttttattacaggttgtagtaggctatgcttcatttttccatctgttgaatgggaaataaaaacacatacagccaatttgaataatgtttttgtttacattttataacttaaaaaatgtagggagaatttttaaactccctgtatgtttacagatatcctaagaaatacgaaagatgaaagacaagttatatgtttcattttacaactaaacagttcatgctctgcccacattgaaagtacgtactcttttgtagataaaaggtacagtcagtcctgctatacttgtttcaaaactgaattctaactcaattgatatattagggaaaaatttgagcatgaaataaatttcacatttgcttgtgtgtgatttcatctataagaagccttaggtaaaagcagaaaactgcacccagttgaactaaaccaggtatgaatagatggaatgcaccaacatcccccagctaccttagtgagcattaggtctttttcaccgtaaagtgccatattgtagtatttatctatttctcaaccatttaacatgtataaaactgttattattaggttcctgtttttgttttttaatgtggcactgaccaagtttttaaatgctgtgccctcactttccccaccagcctggggatttttagtgcgtgatttagcatagtgcagtgattttaggaaggcacwtgttacattatagcagaactatgtttttatttcacttgacataaaatcataactgtgcctagatatttgtaccactggtactgttttctcttgagtccaagatcctgagactgaattctgttcattataaaacttaccaggactgtaatcccagcactttgggaggctgaggcaggcagatcatttgaggtcaggagttcgagaccagcctggccaacacggtgaaaccccgtctctactaaaaatacaaaaattagccgggtatggtggggcacacctgtaatcccagctactctggaggctgaggcaggagaattggttgaactcgggaggtggaggttgcagtgagctgagattgtgccactgtactccagcctggctgacagagtgagattctgtctcaaaaaaaaaaattttttttgaggaaaaaattttcctcttttcctcaaaattaccaggaaaagcccgggtgtggtggctcacgcctgtaatcccagcactttgggaggctgaggcaggtggatcacctgagttcgggagctcgagaccagcctggccaacatggtgaaaccccgtctctactaaaaatacaaaaattagccaggcatggtgacaggcacctgtaatcccagctactcaggaagctgagacaggagaatcgcttgaacccaggaggtggagattgcagtgagccgagattgtgccattgcactccatccagcctgggcaacaaagtgagactccgtctcaaaaataaataaataaataaataaaattaccaggacaatgctatttgtatatgataaaatatacaaatttttggatagtgtttattttaagcaaatggaaactacaagattagtatacaaatgagtgctaatgttctagacctgttcactttagtacagtagctactagccacatgtggctatttaaatgtaaactaaataaaatgtaaaattcagttcctcaatcacgaggaaccaatgtggctaatgcctattttattggacagcgacagatatagacattttcatcaatgcagaaaattttaatgggcagtgctgatttagagaaattgaaaagcatttcctctagtcaaatcaatttgtattaaatcagtattttgttatatatctataattacattccaactgtttcatacataaaaaaagatatatataattttccaaatttttattgtttcctgaattcatataagtcagtttttcagaatttttataaggtttgaaaataatatagatctgctttcctgcatgttctttgaaaccctatgaacctgaattcatataaattcctctaaattaaagaaaatatatgcttactctaatataaccctctatttagtcatttgaaaacataatttaagtgtaaatgtatgattttatgcaggtttscagaccggggacacagtgtagttggtgtggaaatcagtgaacttgggatacaakaattttttacagagcagaatctttcttactcagaagaaccaatcacygaaattcctggaaccaaagtatttaaggtttgttttgatttgggtaaataattgtatccatatccccacaaaagtttttctcagngtgagtattatgaggataccattcatgtgtccgatggttcctatttagcacgcagattcactgtagatactatatagtataagaagcaagggcttaaaaatataggtgatagctacctaaataggtatagacatatgtatataaaagctgaggtcaaagcctctctgtactcaagcttttaggcttgttttatttttattaacacgcattttctgagaacccatcatgtgccagaccctgcctaagacattgaagagataaagataacacagcacacccccctcactcccacccctaaagaatctcttagtttaggagagaagagaaacagggacaaagctatttgtaatgcatggagctaagtgtaaagacacagggtattaagggaagagatgggagttacctgcccaacctggcggtgcttcctgaagcatggtgacagatagagctggaatcaggcagggcctgggtccatggtcttggacacctcgggaagatactacttaaatcacccatgaggcctcataggaagtgatttgaagggaagtagcctcctggcagagagacaggaggctatggcagtggtccaggaaagacatcatgaatccctgagcaaggagagtgatggggcatagagagtggttaggatggattaaagcaacatttacgatagacccgcaggattctgtgaccgaatgaggaccaaaggagcgatgagttcacatttctggctcagatgactggctggatggtcaagaataaatgagaagggcagaaagaatgaatctttttctagagwtgatgagtttaagggacctgtggagtggtgaaggttttatgtctgaagcatggagtgaggtttgggctcaaaatgataggtttgggagtggtctttatgctgtgagcagaatgagccagtgtaaataaacaaacactacccaagtgggaacaagcagagagaatctggcagagactcaaaggcaggcagaggagtggggaagcttaaaagtggacaaaagtaaaagctcccggcatgtgctgttgcgaggctgttggcacagggaagctggaggtgggcaactaggaacggggcatcctatgtgattggtttggggagcatgtttgcctttctctggctgatcctaaattggaagaagtgtggtagtaaaaatcagggaagctggcagtcattgaccaagtcactgcagaggttgtgaagtggctaccttgtctggggtaaattccccaggttcgtcgtcttgtgccaggaaaatttaggacagagacacacatgaggagttcaggagtggaggtttaataggcaaaaaaaaaagagaaagagaaaakaaaacagctctctctttagtgagagagaggggacttccgagaggaaaaaacctgccaggtgtagaagcgccggattttatagtgcagcctgaggagtcagtgtctgatttacayagggctcacagattggttygatcaagtgtgatgtttacataacgtgctgggaaggctggtcgccccaccctaatcttattatgcaaatgaactcttcccttcrctggcaccatgttgtctgcttcttactctacaggtggctgacagagaagggaagatagagccaccattttgaacatgattggcacaaactgccggcatctatgtctgcagctcgattttataggctgctctttgttagaaaggaaaaatgatttgaggctgcttttcattaagaggaaaaccttccgtatcctccctatctgccttagtaatttcttcttaactcctgaatcagttgtggggtcagagttgtattgtcatataggatctattgtccatctgtatattcagtgtctcacaaagtactcttttctaaatattgaaattaattgctcagctgggcatggtggctcatgcctgtaatcccagcactttgggtggccaaggtgggtggatcacttgaggtcaggagttcaggaccagcatggccaacatggcgaaaccccatctctactaaaaatgcaaaaattagctggctgtggtggtgcatacctataatcctagctactctggaggctgaggcaggagaatcgcttgaacctgggaggtggaggttgcagcgagccaagatcgcaccactgcactccagcctgggcaagagagtaagactctgtctcaaaaaaaaaaaaaaaaaattgttgctcagatcagtaggaagcttgatggtattttttatttcacatcttcctcccacctcattctcaaagcattaaagaatccaaggagtttactcagtccaaaaagggctagtcctgcttccaggcccctcttggagcagcagttccccgcccaggctgcacatttgaaatcatctctggatcttataaaaattcccaatccaaaggtcttaccccaggccaattatatcagaatctrtaggggtagggccctggcatcmgtactgtttaaagctccccttgattccaatctgcaggcaaagttgagatccagctgttctcctgcctccaggcccacccatctctgggctgacccagtgatcccaggctggttgtcaaagacccttcctcctctacttgtaaacctgtgtggggacctcatttcagaataaaatctagcagtcttgtgtgctgacacacctttcctacactgcccttcaccccagctcccaggatcctaaagtctatgttatattgccccctcttggagtgtgcccccagtccacaccctagagtgtcaccctttcaaaagtcacctctttttttgttttattctcttgatttttgttgttgttgtttattttttaggattattttgctccaagtgtttgtttttgagacagggtcttactctcacacaggctggagggcagtggcacaatcacagctcactgcagccttgacctcccaggctcaagtgaccctcgcatgtcagcctcccaggtagctggaactacaggtgtgtgccaccacacccatctaattttttctgtagagttggagttttgccatgttgyccaggctggtctcatactcctgggctcaagcgatctgcctgcttcagcctcccaaagtgctggaattacaggtgtaagctgccacacctggccaaaagtcaccttttgtttagtctccctgatgctcccaggcaggcccctgctctgccttctgtgttcacatagttcgcaggcacagaaccacaacagagcaggccattctggattgtaatgttctctgtgcccacgcttctctgctctagtctgtcctcactgtggtcagagactgtgtcgaattcaaatctactgtcaagaacccaggatagatgtcttgtctattaggtactcagcaaataaatgctcattggctgaatgaatgagcaaaaatggaagaatcagcacaattgcacatttctggaataacttaaaatacctgacttttcagtaccaccctgcctgataattggttgacctgcagatttatctttagcagagtaaaaatntcactctgctcgaggaaacattgttagaattttatagcaagctctgaagtgagtaacagccaactgatcttcaangttgtcctctgtgatattcctctgagttggcccaaaagaacctcgcacaggttttaaaagaaaaaaataaggtgccaataaagtgcagtaaaattatttactttaattatgtttaattaacacattctttccctagaacttttgctttgcttggccctctttccttgactattcaagtacttactaagtaaaaaaaaaaaattttttttcattatttcattacagagttcttcggggaacatttcattgtactgttgcagtatttttgatcttcccaggtaggttgaatactacatctgcactttaaaaaatttgaatgcttgccaggcagtgcaggcatgggagtggaggtgtcttcctcactctcttcctcctgtgtaacatccacaaagcatttttttgaatgtctgttctgcagatatttttattacacactcgtctgcacactttaatgtgttttgtctttggttagctcccaaactatgggaaactgaggcagctagggaaaaagaaaggtgagtaagacagtgtcttctaccttgcacctgggcctgtaatagaaatgaatttcaagtagccaagggagataagagctcatctcctgaaagtccctgatacctgagccagaggctgggggcagagttgttgcacactgtcctttgttccttcttcatgtccccaaatcataacagagtggggaggctgctgccacaggctcctaaaaccatgaggggatggacagctctccacacccaggtccacacattcctctaggaggaaacgcagacgtgagatcctaataccttgacgattgttgaagtaccagcatgcaccatgggggacgctgctcatcttcttaaagatttgatttttctcccataaaatgttttttctctttctggtaggacaaatattggcaaatttgacatgatttgggatagaggagcattagttgccatyaatccaggtgatcgcaaatggtaagtaatttttctttttttgtttagctgtcttaattttttagtatactatactttttctgggttctagaaaatcagcttagacttctatgagtttgaaataggttattatgtttggaatttataaaaacctaaatccaatactagctttgtctaaaaagtataggatttgactacagagacctgggtgtaaggctataaggcttgtggctcaatcactttcaagctgtgtggccttggtccaagtattcaacttctctaagctttggtttactcctgcaaaatgggaatatttctgtaatactaacacaatcatcaccacctccactaatattaccaggtaatacttactggtcacttgcctatkccaggtattgttcaaaatactttatgtgggctgggtatggtggatcatacatgtaatcccagcactgtgggaggccaaagcaggaggattacttgagcccaggagtttgagaccagtctgggcaacaaagcaagacgccacctctacaaaatatttttaaaattatccgaccgtggtggtatgtgcttgtagtcccagctacttgggaggctgaggcaggagggtgagcccagaagttcaaagctgcagtgagctatgatcgtaccactgcactycaacctgaatgacagagcaagaccttgtctgtaaaatatttaaaaaaaaaaaaaacaaaaaaatcaaaatatttcatgtggtttaacatttaattctgtaaggtataagctactattccattatacagatgaggaaactgaggtcaaagagattaagttacttgtccaaagttaagcagctggtatgtgacagagttgagattcaaaaccagagtgtttggctttgaagtccatacttgtggccgggtgtggtggctcacgcctgtaatcctagcactttgggaggccaaggtgggcggatcgcctgaggtcgggagttcgagaccagcctggccaacatggtgaaaccccatctctactaaaaatacaaaaatcagcccaatgtggtggcctgtaatcccagctactcaggaggctgtggcaggagaatcacttgaacccaggaggcagaggttgcagtgagccaagatggcgccattgcactccagcctggacgacaagagcgaccctccatttcaaaaaaatgaaataaaataaagtccacactcatgatccctttgttagactacctcaaaggatttttgtgggaattgaaagaaatgaaatatgtaggaaataccttgcatctctaaagaactgtataaatgagagctgttattattgaagcattgttattgatgtttttgatgaccattcttattataccgagtcttgttagaaaataaaattaaaatatgagtgaggaagcatactgagtaaaatgtgaccacatctgtatactctttcaattaaaataatgtcatttatgtgcttacttggatatagcatggaaataytgaattacttagttgtatggagcagactcatcacttggccaaaaaggaggctgggcgcagtggctcacgcctgtaatcccagcactttaggaggctgaagtgggtggatcatgaggtcaggagttcgagaccagcctggccaacacagtgaaaccctatctctataaaaatacaaaaattagctgggcttggtggcgcacacctgtagccccagctacttgggaggctgaggcaggagaattgcttgaacccggcaggtggaggttgcagtgagccgagattgtgccacggcactccagcctgggcaacggagtgagatttcatctaaaaaaacaaacaaacaaccaaaaaaaaaaacaggttaggctccmcatcagtgaaataagatttttatttttaaaaattgtttcatcagtaaggcttactgccaaacctawwctttttaaattagaccatgccgcatcttaattttcatgctcctgtttccctctttttctcactgctcctcctttatctcttttccagaactcccatcctccttgcatgcctaaaagtcgtgattccccaagggaccaccatcctcagccttatgctctcacccaaaaattgccaatatttgtcctaccagaaagaaaaaaaaattttatgagagaaaaatcaaatcttttttttcgagacggagtttcgctcttgttgcccaggctggagtgcaatggcactatctcggctcaccgcaacctctgcctgccaggttcaagcgaatctcctgcctcagcctcccaggtagctgggattataggcatgctccaccacacccggctaatttttttgtatttttagtagagacggggtttctccatgttggtcaggctggtctcgaactccggaccccagctgatccacccgcctcggccacccggtgctgggattagaggtgtaagccaccacgcctggctgaaaaatcaaatctttaaagatcaattctgttactttcattcagctattcaacaaatatttactaagttcctgtgatgttccaaatagatagtatgccagaggcggggcaagtaactgaacagattatacatggtattcgctctgacagtctttacatttccagctctgttctttctcccaaacatccacatcacatgtccagtgtctgctttgcacttcccatgtgacatcagtgtcctttaacaactcaaaatatcaccgagacctctgtctccgtgagacacatttgtatatgaaaccccatctgctaatgtctaaatttgtaggtgtttcccactccctgaagatgatcatccattccttagaggttagtccttctacaggctctggttggcatggtaaaatccaccaagcagtgggaagcaaactaaaagtcaccacgtgcagaccaagagcggacccagcactttgggaggctgaggtgggcagatcacctgaggtcagttatttccccagtgtctgatataatatatatttagcacctagtaagagcttaataaatgttgtttaaataaatgaatggaagaagtgaactgcactctgagcaagggcgatattagtttactatgtactggtagtatcttagggtttttttttgagatggagttccactcttgttgcccaggctggagtgcaatggcatgatctcggctcactgcaacccctgccttctgggttcaagtgattctcctgcctcagcctcccgagtagctgggattacagtagcgccaccacacccagctaattttgtatttttactagagacggggtttctccatgttggtcaggctggtctcgaactcccgacctcaggtgatctgcccacctcggcctcccaaagtgctgggattacagatgtaagtcaccgtgcccagccttatsttagtattttatatatgtgctggtacttagtatcttagttctttatctacatgctggtactcagtacttaccatgttagcacattatattggtgctttcgttaggactgggtgtcttctccttagattgtacrttgtcaagtactgatgtattttctgctgtgactctcgagttcttgcctaatgtaaaccagtagggcagacctcatttttctggactttttgagactggttgagagagaaaaacttcacattctaagaggaatgaagtctttcagtcctaggaaaccctaccaaaccagtctgacatccccctcatggggacagcaagtttcttctgaaaaatgagaatcagaaagtaacagtttctgttcaaaagtttgctttgatgtggttctttcacctacaaggaagagtgatccactggtgaattctcacagtttgtgaggtggttattagtcttatcctcatgttacaggtgaggaaactgaggtacagaaaggttaagaatttgtcaagcttacatagccagtcagtagaggagctggggtttgagcctgggcatctcatagagtctgcacttgcctccccaacttctggcagacctctggacatagatcacagtctagccaggctccrtagaaactggagtgccaagagcccaggctccttcctcagtgtggggaagggtgtccatctttgtccttggcctgtctctcatggcctctctaccaccctgcatgcgtctcctgtcctctccttatccctcagcttcctccatttttattcccacatagctgacttgccttcaacggtcagcctccttgctccaaccaccatacaatacaaaagctccaactttcagtaggaccacagctaattagcaattcctctttggtctcttaattcagtttccaagtcagtcatctgattggtcaactcatcgtctgtacctggtccagccctggcttctgctcagtctattgatgggtcctgttagcatcagcttcccactctgagccaatcagacctggctccctgaggcacctactcaaaggacagttccattgcactcatggtttatgccacacttgcagagctttaatttcatgccaccttttttttggcctgcttgttactctcatttctaactaaatagaggaaaaaaattgtgttttctcttacataaggcccctggaggggtcccagtcacccaggatatttgttaaattgcagcatcccaggccccatggcaaactaactgcatcggtctgtggggatggagctcaggcatcttttctttcaacaagcaccccagtgattttgacacccagcctggtctagaaaccactgtcctcaagcacacaggcatccaaggtcagcaggccctcgagtacctcatcaggccagaaggagtctctacccatccttatgtaatgtcttctgctctgatcagctctggaagcaggcctcgatttgattcccatctggaccaattcccagcttaggcaggggccataatttgctaaacccatttctcacttttaaaatgagaatcaacctcttgtgattattaggagaatttaaactcagtagtatcagcgaaagtaacttctggcttccttccctgccttttgtccctccagcctttgcctgtgtagagaaatgtaacaaataccttcttgtgttctttgtagctatgcagatacaatgttttccctcctgggaaagaagtttcagtatctcctgtgtgttctttcttatgatccaactaaacatccaggtaaagttgttggktttttttttttttcttttaccagttgcctagtttcttgatataaattctatgacatggataagaattattttctcctaatttatctcataggaagcatactgcatatatacatggagataattccagttttgactaatgggaactataagcatgtttttctcttctatattgtacatgattttcttgtattcctttcccattttgtttaccattcacaattcagactagagaagagcggggaaatggatgatcctgatacagaagagaaatctcatgagtcctattgggaagaaggaggaatgtggttggatattgcatatccgtatcacccaagtggtagtgatgtgttggacagatgccttcacatacacaagcacggggtgagaagtgaatatggggatgcagaagttgtgcaggaaaaactctaaattattgtccttttttaatttctgaagttttataatctatctattgcattcttttatttgttttgaatctgttgggggtatgttttctcctggactcattttaatgcattcaaacattgaaacttaacctttgtcatggctggagaaatacatagacttttaatttgtaagagtcacctttttgattttcaactgagctttttaacatgcttgttttgtaaatatttacatatgttagtattttggyttttttgttttgttttgtttttgagacacagtctcactctgtggcccaggctggagtgcagtggtttcatctcggctcactgcaacgtcygccttccgggttcaagtgattctcctgcctcagcctcccaagtagctgggattacagtgtatgccatcacacccagctaatttctgtatttttagtagagacaggatttcaccatgttggccaagctggtctggaactcctgacctcaggtgatccgccctcctcagcctcccaaagtgctgggattacaggcgtgagccaccgttcccagctagtattttgtttctgcttgaataaattggggtcttaaaaactcattaaaagatgagacctagtgtccctaattaaatcagagacaatcaaatggaaatagaaattaatagaggcagaagttagctctgctaatctgatttaaattccattaatgaacagaagccctaacaaagaacctttgggaagaaaatacagcaggccctgtctggaggtggagtctraggatactgctcttagaagggggcggaagctcagcttccttatactctatatcctgcagcagagcgggaggggtgtataaaatgtgggtgagtgcaggagttggtagaaaatcagtatgctagaagatggttgaaacccccaaggaatctgctgatggaatccactctgatttcaatgagcctaagtcccttgaccggtttagctgtctcatctaagctaaagatggatatgatggggatgtaacattgccatcctctcagtaagtcaatttatttctttagtatgagatttgcaaaagaagaatgagaagaacatgccacatcatcacctatttggataatgaagttgtatgtagaacaagtacacctacgtcattggaaataaactcagaatttatttctcttttacctaggtccaccattttatgttccacatgctgaaattgaaaggttgtttggtaagtttgtggacttatgctgtaactttttaaacaaagtcaagttaactcttttgggcctggcgtgctggctcatgcctgtatttccagcactttgggaggccaaggtgggcagatcacctgaggccaggagttcgagaccagcctggccaacatggcgaaaccctgtctctacaaaaatacaaaaattaggccagtgtggtggcatgtgcctgtagtcccaactatttgagaggctgaggcatgggaattgcttgaacctgggaggcagagagtgtagtgagccaagattgtgccactgcactccagcgtgggtaacagagtgagactccatctaaaaaaaaaaaacctattgtgaactattagtatattagtatctagagtatgtctataaaatttaaaagataaagaccattttattgaaagttgttttatcttagaaaaggaactaatctctgtaaatatgctctgtrtatatgctatatgctctatgttaaaggtatttgaacttttctagagagatggtatatwtttttttatttgtttatttttgagataggatcttgatctgtcacccaggctggagtacagaagtgcaatcacagctcactgcagcctcgacctccctgggcacaagtgatcctcccacctcagcctcccaagtttctgggaccagaggcatgcaccacaatgcttagctaatttttctatttttttgtagagatggggtttaaccacattgcccaggctggtctcgaactcctgggctcaagtgatcctcttgtcttggcctcccaaagtactgggattagaggcatgagccgccatgcccagtggtgtatttatttttactcttgggagttaaaagtgataataacaattcagagttcaggaaatttkcccttagcattcctctgttttgattaaaaagaagagaaaaatgtttagtgtacactgtttttaaaataatttcaaggttttgtttgtttgttttgagatggagtttcgctcttgttgcctaggctagagcgcgatggtgcaatctcagctcactgcaacctccatctcccgggttcaagcgattctcctgcctcaacctcccaagtagctgggattacaggcatgtgccaccatacccagctcattttgtatttttagtagagacagagtttcaccatcttggccaggctggtcatgaactcctgacctcaagtgatccacctgcctcggcctcccaaagtgttgggattacaggtgtgagccaccgcacccagccaattttgagtatttttaaaagaatccctgatgtcattcttcatagtattttaacatgttactctttcttgtttcargtaaaatatgcaatatacgttgtcttgagaaggttgatgcttttgaagaacgacakaaaagttggggaattgactgtctttttgaaaagttatrtctacttacagaaaagtaaatgagacatagataaaataaaatcacactgacatgtttttgaggaattgaaaattatgctaaagcctgaaaatgtaatggatgaatttttaaaattgtttataaatcatatgatagatctttactaaaaatggctttttagtaaagccatttactttttctaaaaaagttttagaagaaaaagatgtaactaaacttttaaagtagctcctttggagaggagattatgatgtgaaagattatgcctatgtgtcttgcagattgcaagatattttaccaatcagcatgtgttacctgtacaattaaaaaaatatttcaaaatgcaatgcatattaaatataatacacacagaaaaactggcatttattttgttttatttttttgagatggagtttcgttcttgttgcccaacctggagtgcaatggtgcaatctcagctcactgcaacctctgcctcccaggttcaggtgattctcctgcctcagcctcctgagtagctgggattacaggtgtgcgccaccacgcccagctaattttttgtatttttagtagagacagggtttcaccatgttggtcaggctgatctcgagctcctgacctcaggtgatctacccacctcggcctcccaaagtgctgggattacaggcgtgagccactgcacctggcctgacattctttwtgaaatttagaattgttgaagaactataacatttcagtagggttcaaggtggtcccaaaagttatataaaagattagtttttactataaacccttgtcttttactcagatcctagcatcccttttcacatggtttctccatgtatataacagaatcaagaaacaaattttaattaaacaatctgtaacagaatcaagaaacaaatacattttaattaaacaatctatatggaacaaacattcccaaattctaagaataaatttttctttaagttttctctgagtttggcaattgttgttttttataatttaatctgtttaaatcatcaggtcttataaaatataatgtacttagagctggattcatggctgtttattatgaaaggttagatttctcagttcttctttaaccacattttgttatatcagacagtcctctataactctgtactacccaacaactaaatggtttagattgtttagctcatgttaataggatggttgtgtattataaaaaacgagttacgtgtgtgtgtgcacgcatgcacgcacatgtgctggcttaaaggttgttaatgcaaggtttggggtcccctttaacactggtgaaagctacggtactctccccagagatatgtcttgtcagcctctctagttccccttggcctgcatgtacaaacttctaccctagaagctctctgccatcgatgtattctaatagatttgtaaggctattaatttgaagcaactccttgctcacagtgattcttgcttctctgagacctgctcccagtcgatactgtgggcttcagaagccatgactccccaactctgcctgtatcaccggttgaatggacaactaacccgagctggaccaacacaattctctccagagacttttgattttacttttatgtagagacagggtctcactttgttgsccacgctgatgttgaacttgacgtgaggcctcaagcagtcctcctgtcttggccacccaaagtgctaggattacaggtatgagccattgcgctggccctcttcataggcttttggacttgggaatagaaaagcaaccccgtctctactaaaaatacaaaaaaattagccaggcgtggtggcacgtgcctgtaatcccagctacttgggaggctgaggcaggagaatcacttgaacctaggaggcggaggttgcagtgagctgagatcatgccactgcacgcmagcctgggcaacagagcaagactctgtctcaaaagaaagaaaaagaaaagaaaaaaaagaaaggcaagttgactgctgaaaggggaatctgtgtacgcctgggagctgtggggcagccacattccagcacatggatctgagaaacagaacgctgatctgcagaaagagatgagaaccaaagagaggccacctgcgtcctgggtccattttcatcctccctgaagcccagctgcccagggtggggagaaacaccctgtgtccatgggatagagtcctttccgcttgcagttgtgcccaaagaatcttaaatacaaatgagatatccttaggtagttgatcatttatgtaatatgtgtcttcactggggaatactgacttcctaaaatctcaagatggaagatataccacatgtaaattattttagagcaattaaattgttttcaggattttccaaaaatgcttcttgtttcattttattatttaagtaacagattatctgagcctctgtgccctgcacacagtggtttataaatgccttgccctgcctatgaagcaggcatgaatgctccagtatagacagtgttatcactagcagacaggacaaagtaagaaaggtacgtaataattaatctatttgggtgaatgtggaaagaaaaatacaaagaaatataaccaaagcttaaacagctatcactgggaagtcagagatttggctccataaagaatggtttagggaccacagaaggtggcccaaaagatgtacctatgagagagctcccagctgacgggattcattggcagcatgaagtgacaaatacaaatctaagccatggagatattagttcaagcaatttaccaagtcgcaactgtagtacatacctgtcattgttttattttaatacaagggagcaatttcaatgtgtgtttgtgtatacatgtatatgtttatgtcgcacctactccttattttttttttttattttgagacagggtctcactctgtcgcccaggctggagtacggtggtgtgattatagctcactgcggcctcaatttcctaggcttaagcaatccttctgcctcagcctcctgagtagacaggactgcaggtgtgtgccaccacacccagctaattttttttttttatttttagtagagacaaggtctcactatgttgcccagcacgatctcaaactcctggcctcaagtgatccccccacctcagcctcccaaagagctgctcagcctacacctactctttctgaaaggtgtttcagagaaagatttctactgagtgctttttaaaaaatcagttattggccgggcacagtggctcatgcctgtaaccccagcactctgggaggccgaggtgggcggatcacctgaggtcgggcattcgagaccagcctggccaacacggtgaaaccctgtctttactaaaaatacaaaaaattagccgggcatggttggcacatgtctgtaatcccagctactcgggaggctgagtcaggagaattgcttgaacccaggaggtggaggttgtggtgagccgagatcaagccattgcactccagcctgggcaacgagcaaaactgtctcaaaacaaaaacaacaacaacaaaattaaaattaaaaattatcatctttaatccctacagctctgactttccaatcacttcttatgtgatgtgctttttgccttataaaacattatatgacaaattcaccagtggctggtgggaattggacagaattctatttatgtgccttaagcatagtcattccgatttgcagaaaatagtcatgtcccagatttattacttatgtgtagctgtaatttgtgagctgaaaatatgcttgaaaatctgtgattcctgaacagtgggtattaatagaaatttatttcactattggtgttaactttcgacaacagraggataatcgaggcagatatttagaaatgaaatatatcataaaatattaagttatttatatttaaatatgacaaataatcctttatgcattgaaaatttgggaagtctaaaaagaaaaagaaaagcaatcaagtcctatcactggagataattactgctatgatggtgatgtattttcttctcatcttttttgtctgctcatacatgtgaatgttttcacaaggttgttgtgatcacattacgatacagtattgtatctccactatctttctttctatttcattcacccttcctggagttgaggcaggagaatagggtcttgaggcagggaacctaaggctgattcatgctgacttcctagaactaaattgaaaggaaaacctcaactttccatgcctaagtaacaaaaggaccagaggctactccctttgtaacctccaccaccccaccgcccctagccttttctgcgtggcagaaacatctgcaaccaatcaaacgtttgcataggagtgtaacttttgtaacttcacttcggcctctcattggttgcagcaagcaaaagcaaccaatcagactgattgcaggccactactttatttgcatgggatgaataccaagtggccagtgggaaacctctaggcagtatttggaccccagaagattctgtaaccagggcccttgagccactgctcagccaggtcccaccctgtggagcactttcattttcaataaatctctgcttttgttacttcattctttctctgctttgctgtgcattttgtccaattctttgttcaaaaagccaagaacctggacaacttgtagtcaaaccttctactggtaacagtgtcactaaatatttttcaaaagcaagatttttaaatagctgtataatgttgtaatgtggcagtacaattattatttagtctttctcctgctattagagtcagcattcattcagcaatttaagtactattgggtgtgctagcagataaaggtttattgattattgaagataatccttttctcaggcatcacaggttgtaggggtagggactgaacattgaacttcatatggtatggctgtcttaggggtacaggcagggagctgtcagcttataagtggtcatttaaaccacgaggaagtgaagatggcattgctcagggaaacaggtaggaagctaagagaaaaagactgaaggtggcaccctgaggaacactcaattgcattgaacttgagatgcactcaaatctctagatccccatttccaaacatacatctccactcatttttgtatggacttactcaaaaaattcaaaaacagccattcttcctcttgccaccacatccctcacccctgagatgccaagaacatggagcttaaaaattagagtggtggtcagagacgcccctgggaggagggcaaggctggaagcaaagcccattctgtgtggcttgttcatcttcctttcccttacatcattgtcaggtagtctgagttgtaattggatcattaaacttgttctgggattccttctaaactgcatgtgtctggcacatttgccccacctgcacaaccaggagcccacctgtctaagcactgactccccctaactcatgctccccctgtgctctcttctctgctggaaccatcctgagctgggtccccactctccttccactatagtatggtactttttcatagggcagccattgaccactttggaaactagacgttctgctcttcaagccctttgcccccacaactctcagggcttgttctaggtggaagcaggaaaagatgggcatgctagtccaggaccctctatagaaggaatatcggagggaagcacagggtaaatccatggaggcccagccatggaggaggaaatgatagtcataggaaatgccaaatgtcagagtgagattcaagacatatttgttattaatcaattatgcaatggtgtgattgcataaataatgtgattttagttggttgtttatttgggatggaaatgtagtcagaaattattaagttggttattgtgtcccagtacgcaatctttgagtcaaatgacatttgattagaaaatgttctttcttgtcttacattaaagctctttccaggggcctcaacaggggataaaatattgtgttttctcagaaatctagcaaatcagaaggtgaatgttcatgattatgatctctaaaggaaaagaaattctctaatacaaggttttgttaagcacaatgttcacataagacatttgagggagaaccccttaaaaataagagtttagggccaggcacggtggctcatgcctgtaatcctagcactttgggaggctgacgcgaaaggtcagaagtttgagaccagcctggccaacatggtgaaacctcatctctactaaaaatacaaaacttagccaggcatggtcacgggtgcctgtaatcccagctactcaggaggctgaggtgggagaaccgcctgaacccaggaggtggaggctgcagtgagccgagatcgcgccactgcactccagcctggtgacagagcaagactctgtctcaaaaagaaaaaaaaaaaaaagaaagaaaaagaaaaatgagagattataataccacaatggattcttcacacagattatgctatcccttgtttgaagattttccaacatatggcaaattctctttgtttttggtcttaactgagattggaaaaactgaacttagtgtcatttgagggaattattataatgcagtgtttctcaaacttggctgtacattataatcacctggggagcttttataaatcccagctgtccagaccacaccatgggccaattaaacttttcgggtgcaacccaggtgtttaccatgtgcaaagaagtttgaaaatgactaaaataggtaactctgaagtcaaactgcctggcttcaaattccaggccagccacttcctagccatgtgaccctgggcaagatatttgatttctatgaattctatcagaaaaaaagacaataaaaataacatatttttgtaggattgctatgaggtttaaacaagataatctatgtaaattatttattaatttgctgcaaaagtaatcacggttttgccattaaaagtgatggcaaacactgcgaatccttttcaccaacctaacacaatggggcaggcatatgtgaattccataggctgggcacagtggctcacaccagcactttgggaggccaaggggtggggaggaatgtgaacaattttcacaagttcaagaccagcctaggcaacacagtgagacctcctctctacaaaaaaattaaaaaattagcctagtgtgatggtgcatgcctgtagtcccagctactgaagtgggaggattgcttgagcctgggagatggaggctgcagtgagctgtgatcgtgcccctgcactccagcctgggtgacagagtgagactttgtcttaaaaaacaaaaaaatgaagttctatggtaattattattaactaacagctttcttatttcatattaattactctgcaagacacttccagcatggttcccccatctgacactcattcacctcgttgatttttttttgttgttgttgttgttctataacattcattcatgcacaaattcattttacaagtatgtattcatctaacattgacttaactatgagtatgacagaagacacaaaagaaatgtacacatctgcctcacctcccttggagtttatcttctctagtgtgttcgtgttttccggttcagatcataagcatcatgagctaagggaccatgttttatgcccggacagccgtagcacccggcgctgcggattggagacactgctaggcacccgggctggaagattgggttctagttcttgttttgccgcttacaggctgggtgacagggagcaatcctgttgtcctcaataggtgtgtttcctcatctgaaagtgtacacaatccatccatgactgctgtgacgattacaggtctacacaacgcgcatgtggatttgtcttgcaaacgtccaccatcaggccctcaggaaacagtgccgcgcgtgcccaccaaggggcagcagatcgcagtgcagaggcccgcggcgctcgacgtcagggcgcacgtcccaccccgtgaccatgactgtgaccgtgaccgagagcgtcgctggggcacggccaggcggcgcggcgggagtgcacaggacgcgccatggcggccgaagcctcggagagcgggccagcgctgcatgagctcatgcgcgaggcggagatcagcctgctcgagtgcaaggtgtgctttgagaagtttggccaccggcagcagcggcgcccgcgcaacctgtcctgcggccacgtggtctgcc

SEQ ID NO: 93956 - DNA, 13774 bp, Homo sapiens
gttaaggggttaataaacactttctcagctgactcctgaatgaatcatgttccacatcctgagtcctccaatgtatactgtgttcaaacagaatatccaaagcaggggaacacctacagctcacagaaataaaactcaaatttttcataaaccaggcccaggctacccacatacaccttgatcaagtttagcttcttggactcagtactatacagggatactagaaaagtatcatgctttaggtaataaatggtggctcacacctgtaatctcagcactcggggaggccgagacaagaggatcgcttgaagccaggggttcaagaccagcctgggcaacacagtaagacccccatctctacaaaatgcaaaaaataaaaaaattagctgggtgcggtggcatgcgtctgtagtcctagctactcatcagtgaggcgggaagactgcttgagtcctggagttcgaggttgctgtaagccgtgatcacaccactgcactccagtctgaatgacagagaaagacctgtttcttaaaaaaaaaaaagaaaaaaaaaaagaaagaaaagaaaagaaaaaaacagggctgtgagaagagaggctggtggaagactgcaggccaagctaatctaggccctgggattcaaaatgaaatatgacacttattttgcccttcaactaaaaactgtgcttctgccatcaccttctttctaaagacaatttattcatcactgtatttctcctatgtatccctcgttctccagaaaccccttcatgagaaaaagtaattctactacaaaaccttcttcccgtgttgttttcttcctctttgcttttaaaacaataaacttagtggcaatcatctttggcaggaatatgccttgtctttgccgtgggaaaggttaaagtatagttagccgctagcccaattaaagtggagagaactaatcggccttattctttctccccagcccagctgcttgaccttatctgtttccctcctagatgcaatcccaatgcatctctcactgcatgctgagttaagagcagcacgagttgggatcacacaataagcagcatagtgtgattatcctttgcctggaatcacacacttacactccaaattggtaacctgaaaggaaaggtaatcctcaatgaaaacctgcaaatcatatctttttgatgatcttctcagacctgtaatcccaacactttgggtggctgaagcaggcagagtggttgagcccaggggttcgagaccagctggggcaacatggtggtactccatctctacaaaaattagctatgcacctgtagtcccagctactcaagaggctgagatgggaggacagcttgagcctcggaggtcgaggctgcagtgggctgtgtttgtgccactgcactccagactgggtgacaaaacaagaccctgtctctaaaagaaaaaaaaaaaaaaaaaaaaagaaaacaaaacccaaacccataaagccttcttacaaatgtttacacaaagtagctctttaacgttaatatattttacaaataattactacatatctacaacgttccagatacagaagaaatggccaaagaaggtattttaggagatccagattataatgaactatgccatttattaatttagtcacttctttaatatctgaggatgagcaaatcaaatactgataatggctgcagaaggacacaggctcttatataataatcttacttccattccagaataaaagggctggagaaggggggcaggattattctgttgaaggacaatggcatcctcagcaactcacagggatgtgcaggtgaacatcagaccaggatgggaaccttataatatctatgatatactatggcttctatcaaccagtttcaggaaaagcaaagaagaatgcagtcatggccaggcgcagtggctcacacctgtaatcttgaggtgggcagatcacatgaggccaggagttcgagaccagtctggccaacgtggtgaaaccccatcgctactaaaccccgtctctactaaaaaataaaaaattagccaggcatggtggtgggtgcctgaattcccagctacttgggaggctgaggcaggataatcacttgaacccaggaggtggaggttgcagtgagtcaaaatcacaccactgcattccagcctgggcaacagagcaagactccatctcaaaaaaaaaaaaaaatgcagtctaatggcagaattagacttagccactttacttggaaaaatttggactttatcagctccatcaagcaccatgctccacaccatgcttattaaatgtctggagcaacattagatgggtgccattccaaattccaaataatcacatctttgctttgcaaacaggatgtggcttaataatcaaacagggaactagattcattcaagtatctagttcctaaaataagtctatttaacaggttcaacaacatgcaacacacaccctccaattggtagaaacacctctcaatgacaaagaaaggtggcaaatactaaacaccttcacagaccatttagcaactggtgggactaacccttgaaggtgaattcaaaatagaactgaacctcaataccagacttctttttcagaaaagggagtatgaattcttagtttcaggttcagacaaaaaccagaagttgtattgcattaggaaaaacactgggctggtcaggtggctcattccaccctgtaatcccaggactttggtaggccaaggcagggggatcacttgagctcaggaattggagaccagcttgggcaacatggcgaaaccccatctacagaaaatacaaaaattagccaggtgtggtggcatgctcctgtggtcccagctactcaggaggctgaggtgggagaattgcttgagaccgggaggcagaggttgcagtgagccaagattgtgccactgaactccagcctaggtgactaagcaagattctgtctcaaaaaaacaaaaacaaacaaacaaacaaaacctactggcccagagcctacaaataagttgtttggaggaagaggatggaaatctgttagttaagatttaacctgcatatgttgccttctttactaaaatcagactcataaagaaatgtattctggcttcagccttgttggtattgctctacctctatttgtttcccatgctattgcttcatccttgtttctgcagaactaggattttagctcaaagtcacctaaaagcctccacaggaaactacattccaaagggaagactccatgggaagagcaatagagaaagaagttacttttaagtctttggtaatgttcacccaacccagttttcattttctctcaatggacaagaaccctcaactaataaagctaatgaacttacaggaaggtaatatatggaaataaacatcttattgaatttatctggctctaaatctcttttgttagggaatttatagtattccattatcttacaatctctccatttctatctacttgattaaactatggtgctatagcaatggaggtgaaggcctaatttagaagtataggaattaggtatggcgcggtggctcatgcctgtaatctcagcactttgggaggctgaggtgggtggatcacttgaggccaggagtttgagaccagcctggccaacatggtgaaaccccatctctactaaaaatacaaaaattagctgggcgtggtggcaagcacgtgtagtcccacctactcgggaggctgaggcaggagaatcgcttgaacccaggaggcggaggctgcagtgagccaagatcgtatcactgcactcagcctcagtgtaggctgagtgataaagcgagactccgtctcaaaaaaaaaaaaaaaaaggaaaggaattattctcatgtatacaatagtaggaaacaacctataaagcttttgagaatcttataattcactgtgtacctccctctgtttcatattttcgcaattgaactatagagcctaggcctaggtcttaagacttttcttgtaaccttcagagtgcccagcactgggattgacatataccagttagacggatttttttttccataaaccaggctcaaactcttctaaaccaaaatcaacatattctgagtgccaatcttgggtaaggcactctattatttgtcatgaaggattcagaggaaaatgtgatctaccacactcaacagcaggcctcttatcctctccagcttaatgcattttaccagttaaggactaccctgatgctgagattgtgtttctttccccaaatcaaatgtcactctctaagggtcatctgtataattaaatgcttttaattctatatatcaaatgataacttttgtgaaagtaatttaaacacacttgaaacatcatataaaatgatattactacaagacttaaccgtaaatgtggctcccacccccataacatctatacaatataaccaaagagctagattccagattatcaagaaacttctaaattttgaacccatgcagcagaattgtattcctttacattgttggctcgacttacaaatgtgctgtggaataattatcctcaaatacaattttcagtactgattacatagctgcctaaaagaaaactgttagccccttccattttatgtgaaaccaatgtctaaagcgctcttgactcttcaaccccacattttccccaccctcatccctcctcaatccccagccccaactcatcacatccactagacctgaactttgaactcaatcataattctttgtgcctctgctcaagcccttcttcctgcctggaataccctcttttcagtcccggctaattacatctaccatcccattccaagtggccgctggaaactcacttccttatgttctatgatttctttcacaatttacactttttttgttttgttttgttttgtttggggggggggttgtttttctgagagggagtcttgctctgttgcccaggctggagtgcagtggcgcgatctcagctcaccacaacctccacctcatgggttcaaccgattctcctgcctcagcatcccgagtagctgggactacaggcgcgcgccgccacgcctggctaattttttgtgtttttggtagagacggggtttcactatgttggccgggctggtctcgaactcctgacctcgtgatccgcccgccaaacattctatgtgccagaaacttgtatgtaactttgcatagttcttgtattatgtctccccaattttgagtgttttctctggtctctactcagcccttgctcacagtctcactaggaccctggctagcttgaacacggtcagaaggatcaccttagatttctgctggcacagtattttccataaattaatctcctgattgaaccgtagtcctatagtagttatctttggatgaaaacctaatgcagctcgaggaggaagtggagtgcctgtgatcagagggctggacaaaagcccatagggcgtctctggagccctgggggaactgtccccaggcaggcactctcagggcccaggaacagggcgggacaagtccgactcacctgtgaggtaaggacggggccaagacccggaaccgaaaagcaggtcacgatagcgctggaaggcctcgtcgaggactgagcagccgggctgcgcggccgagctgacatcgtactggaattgaaagttgttcgggtaaaggacgtagcgctggtcggaggtttggaagttctgaggccagggccagagggccgtcgcccgtcctgcgaacgctgccgccagcagcagcgaaaaccaaagcctggagcttgtcatggcccgctggtctcccctctcggagggggctggccacgtgagaccctggtcaggtgagcggcgcccccgtgacttatcggcgaatcacgtgaccagaggcggctctgcgcctgcgaccccaggaggacccacaccctgccctttcacttccggcctggacctgaggctcctgctacgtgcagcggattgtgccgggcgtcggcaactgctyggctcgccagactgytcacgggcccagtagagcagtaaataaccggccacccctgcggccgtgccggccgtgatggaactagacagctcacccgactcgagaagaacggggtggggaggcgaggacgcagggcgacctggagaagaaagtttcccagatggctctagggtgaatcttgaatgttgtgatgcagctcgccaggcctacggggaggtaaaggacttgccaggctgaagtaacttcagaagcagaaaaacggaggattaaaaccacaagtcgttgtgatgtgaaatttcgtggggcaagaaagggccggaagtaggtagtctgcacggctctgctagagagaggatcacaagatcacacaaatgtgatctacttatgactggaaaaaatgtgtactttcagagccagcttgaggcattccattgcctccaatatgagctcttcccttcaagattgastataaatctcttagttacaactcacatcccctttccccagacaaaaccccacatagcccggtgtgtatttacygaaagcagtaagataytgctggggctttgggtgcaagatggagagtgctcagagataatgacaggggcctggtcctgcagggccttacgtagaaagtcaaggaatttattctctgagcaattgaaaatcatcccraaagatctgcattttagaaataccatgttgagtagttgcataagaaaccagttaggaggcccctttttattggaggtagagaataatgagagactgaactacagaagtggggaaggaagacagctgtagatccaagaaatagtatccggaagagaggcttgagaagtgatcaaggagaattccacagttatcagagaccctgtcttccttgttcaccactatattaccagaacataatacaaataatgctattgttattgggtggcattatttggttagtaggtactttttaaaatttttaaatttaattttagtattaaaatacatgtaaagatcaggaaaatgaacttttaaaaataaagggctttcactgggcatgataacacatccctgtagtcccagctactcccagctattcakgaggctgaggcggcaggatcacttgaaccaaggagttcaagtttagcctgggcagtatagtgaaaccctttctcaaaaacaaataaagggctactgaaataatgataatttatattcaggtcgtaggtacctaattactagttacacatacatggctttgatgggaaatcaaagaaacattctgacaatacagagattcatcaagcaatttgtctttgaaagttgattattcaaaaacagagcttgtagcaaaagaagcagaarttagatcccacagtcatcaagtttcagatcctaaggcttgcattcttacaccaatttcttctttgcttaaatcttaattttcatcagcattaattaagtgtctgggtactctgccagtcaggagagatgttaccaaaggtacaggatttgagaagtattgtcagaagagccaagttcataatcaggcccayaggatcaataatttgggggagtgtttagagcagtttcaaagatgagagcagtagatcaaagtagaatttcaggactgagcacatgccaaggcacccttttatggatattcaacctgtaccagaagggaggagtcatttacttaaaagagttacacaagatgaaagagctagatccaaataaagacgctataaaaattactaatggggctgagcatggtggattacagggattcagttatttaattattactgaaagagctcttttagacttaaccagatttttaaaccaaatattcttatgcatacataaaagtaagttacacaagataaatttgttgatcttccaaaatatccccccttactatacactagagtggggttttggcataatggcagacaaatagatggaacggaatagagggtccaggaaaagagccatttgattattactccatttcaatgaagacaccaatttaatttagtggggaaggcaagttattttcaataaaaggtgatgaagaaaatagatatccctatgtgggaaaaatgaactatgatcccctacctcacagcatacacaaacttaattaaaaatggatcacaggctggggatggtggctcacacctgcaattccagcactgtggaaggccaagatgggaggatcacttgagcccaggagttcaagatcagcatgggtaatacgaggaaatcccatctctctttatttttttcttttttgagatgggggtggttaatgggtacaaaaaaagtagcctgaataagacatactattcgagagcacaatagggtgactatagtcaataataattgtatattttaaaagagtgtaactggattgtttataactcaaaggataaatgattgagggtatggataaccccattctccatgatgtgcttatttcacattggatgcctatatcaaaacatctcaggtaccccataaatatatacacctactatataccaaaaaaacttaaaattaaaattagactgggtatggtagctcatgccttaatcccagcactttgggaggctgaggcgggtgaatcacttcaggtcaggagtttgagatcagcctggccaacacggtgaaaccccatctctactaaaaatacaaaaattagtgtggtggcaggcacctgtaatcccagctacttgggaggctgaggcaggagggtcacttgaacctgggaggcagaggttgcagtgagccaagatcacgctactgcacttcagcctgggtggaggttctgtctcaaaaaaaattaaatttaaatttaaaaatgaataaacagtttttaacaatatgaattatttaaattagtatatatacaacattgccatcaatttggacagtagatgaatataaaaaataataacatactgtatataatatttgatggtttttcttttttttctagttgtcaaatgatcctttattgaaatattttcctttgtgcttaactagctgggcattccacagcaccactgttgatgtcatctatgatgtcatgagggtgctggccatcaacattacagcccacagactgggcagtccccaggatctctttaatggttccagagagttctctggctaaggatcagtgccgcatctgttgagcaatgttgacgatctcatcaaaagtgatattcccactgtgtttaatgtttttctgtttctttctctctcggtggttctttgagggctttgatgatcagagcagaggcagaaggcaccacctcaatctgggcctgtctgttctgagtggttagtttcactgtaatcctcaggcccttccagtcacccgttgccttggcaatgtcatcaccaaccttttttggagacagacccagggggccgatcttgggggccagggcagaagtggcaccgacttcacctccagtgcacctcaggtatacaactttgatctcgttggggtcgaactttggcggcatggtggaggcagctggtgtcgaatgaacccggattcgggatgaccgaagaaagttgcaccttggcctcctccgagccaaaagctgagagctattttttctttattaaaggcagcttgttaaatgaataaaaacatgatttaattttcatatctatagcttctaataaaattaatttacatatcagaaaaataattcactgtcagacaatgtgttcaggtttttggctcataaattaagggatcagaaagaagcaggaaataaataatttgcctcaggaagtcttttacaatggaggtgaactttgaattgactcccaaagcatgagttagccaggcagggaaggggagcataggcaaagcacagagatgtgaaagagatgacatattgaacaaagggtttatggggctagcaaaagaaaatgtgccacgattacctcacttcctggtcctctaccatactctcttctctctgcaatgcctttcccactttccaatccctccacctacttgaaggtctaaacttatattttaccatcctggaaatttctgacttctcaaatctgggtaagatccccctctgtgatctcataactctctgagttaatctcatgtatctgaaagtacagttgacccttgaacaacgtgggtttgaactgcactagtccatctatacacagatattatgcagccaaaggcagatggaaaacacagtgttcttgggatgcaaaccccatggatatggaggaccatatgcaggacttgagtatgtgcggagtatatgcagattttggtatccttggaaggttggggacgtgggggaggcggttcctggaaccaatcccttgagtataccagggtatggctctattgttattgtttgtccatttgtctgtctgttccactacagtaagagcttcttaagggcaggttctgtgttcactagcccctggaacagtgtctagcacacagtaaatgctctttagcatgactttattcattttaagagtatttcttggccaggcacggtggttcacgcctgcaatcccagcaggttagggtctgaaactcgtgggctcaagtgactctcccacctcagtttctcaaagtgttgggattacaggcatgagccactgcgcctggcctagtatttcttgaatctcctactggtgtgctgagacagccagcccctcaatccttggggtggtagggcctggggcagctagacatcctggcgagtcacctgcagtcaagagcagtctcttcctgtgtgtgctgtgatgtgtggaaggggaaacatcatctcctcttgggtacttttgtatagtaccctcattatagcctctttacttgtccatgtcctccacagcccacatgctgaatgaatggtacctttttcacaattgtatccttactgcctaagccaggactctgcacacagtaagtgttcagcaagtacttgttgaatgaatgcatgaaagaggaagcatttgtgttaaattttgaaagagtttgaatttcaatgtgtaaaggaaaagagcagtctatagagggggaccacaatctagaaggataactctatgtaacttgttcactttaggatctccaggttctggaagagtgcctggcacatagcagacacttaatgaatattttctggatgcatacaatgaaatggcaaatgaacctaggcagagatctccaaagcatctggagagataccagggaagtaagcaattctgtctggctagaacaaacagtgcatgaagagaaatactaacagaaggaatgtaaggaatgttagaaagtaggttgaggccaggcgctgtggctcacacctgtaatcccagcactttgggaggctgaggcgggtggatcacgaggtcaggagatcgaaaccatcctggctaacatggtgaaaccccgtctctactaaaaatacaaaaaattagccggccatggtggcgggcgcctgtagtcccagcttttcgggaggctgaggcaggagaatgacgtgaacccgggaggcagaggttgcagtgagccgagatcgtgccactgcactccagcctgcactacagagcaagactccatctcaaaaaaaaaaaaaaaaaaaaaaaaaagaaagtaggttgaaactggattgtaaagtaaggaaagtaggaaattgagtgaggcaccagacatatgttgtcttatttatctctcacaacagctgtgtgaaaatgagtcttagctacattgtacaggtgaggtaattgactctgagaattaaaataacctgacccaagtcccatgtaattgtcagaaccaatgtttggacccaggtcttctgtcccaaagttcatttctttttatatctatcacagttccttgaaagctaggctgcagattgtattgagattttactcttgagtccatgggaagcgagagaaacttctttagttgaggaacaacaaggtcagagctaagattcactaagattaatctgttaacgtatgtaggagagattgaatgggaaagccaagtgcagggagattatctctgagactgttaactaagagtttaacctgaccatcctcatgtgctatgggactcagaaagtgtagactcaaattcacttgggactgatggtttcatttctcttctcccacactaggtggccagaccagcaagacttaagctttgtttaacttgtcaatgtttacagaagtgcaggttgccaaaattctctctgcaccctgactcccactcccttttttaattttttattttattttttgaaatggagtcttgctctgttgcccaggccggagtgcagtggctcaatcagctcactgcaaccgccgcttcctgggttcaagtgattctcctgccacagcatcctgcatagctgggattacaggcgcccaccaccacccacggctaatttttgcatttttagtagagacagggttttgccatgttggccaggctggtctcaaactcctgacctcaagtaatccacccacctcagcctcccaaagtatgaggattacagacatgagccactgcgcccggccacctttattttttattaaaaaagtttttttagagacagaatctccctctgttgcccaggctggtgttcagtggtgcagtggcacaatcagctcactgcaatctcaaactcctgggctcaagggatcctcccacatcagcctcccaagtagctgggactacaggcacatgctaccacaccaggctaatttttaaagtttttgtagagatggggtctccctatgttgcccaggctggtctcaaactccggggctcaagcgatcctcctgcctcaggcttccaaagtgctgcgattataggtgtgcgccactggcccagccatcctgacactctttaaatccattccatttcacatgcctctgcttctcctttttcctgttgcctccaagctcttcccttcctatttctagatttacaaaactctatccaatttatcactactgaacatatacaattttctgtagggtttctaaaaatgtgtccagggcccagtgtggtggctcatgcctgtaatcccagcactttgggaggctgaggcaggaggattacttgagcccagcagttcgagaccagcctgagcaacacagggagagcccatctctacctctaccaaaaagaaaatgttgtgtccagtttcccttcttttttagcccaatcccctcctgtcttctagttttataattatcctagttatcttattcaggtttactcactaagtcttagcagactttcctaaatctagacatacaccccttacaataactggctttgtcctatatccatccgatccgaggctataaatagacctttcttttcttttcttgtctgtagagacttgctgtactttttaaggatcttgctctgttgccctggctggtcttgaactcctaacctcaagcaatcctccctcttaggcctcccaaagtgctggaatgacagttgtgagccaccacacccagccagactttcatttatggcctgaattttttacaaaggtttttctgtgtgtcataaaactagaaaaactagagccccaagggaactttcaacagatctgagctaaaggagtgacagtggaaaggaggctgtgggacaaatgcatgtgggacaaatgcaataatatttcagatatggaataatggaactcagcagctaactgggt

SEQ ID NO: 93957 - DNA, 31333 bp, Homo sapiens
  misc_feature (1)...(31333): n = A,T,C or G
gccatttctggctgtaggaattactagatgttcagagaaagtgtttcagtatagatctaaaaattatgcataaaaatttttgtttaatcctctaaagtaatcaatgaactgttggggaaagaagtaagatatgtaccctagataataagaaactaataatcccgaaagttaaggcattatcagctaatgccagattgccatccatataggacacacctcctcattgtcaggaggtagtgacagggggtatattcattatcccagatgctcatgtgatggggagaacagacaaaaacatgaaaccaagaggatggactggaaaaccacatgactccagaatcccagaaaggttgtactgtcagaggcttgacctgaaaaatggtggtgagtgagggcaggaaggagggttctagagaaaacaatggagaaacttacttatcgtctttagatctaaataaaaaaataaaaatgagaggtgggaatccttggagaacacctaaccacaagtttgttaccacatgggttggggccatggggcccatgagtggggctactttcactctccaataaatctaagtcaaatattttgtttaaaatattcccaggtgtgatggaagcattctgaaactggaatgaagtaatgcacaactgcacaaccctgtaaatttactacaacacagactatacacttaaaatgggtacattatagcatataaattatacttcagtaaaacagagtaagggagagagcatgcctgtcatactcctcatcctaatcatatatccatcaaaagttttttttctataactgtataagcaaaaaatgcccttcacaaatagtatttccactgatcacagagagagtcagaaaggaagagaaattcctgatgagaaaagcagaatgaaaatgaaaataggagaaaatgtatctgggcccataagtctctggctgtaagtaaccttggcacaacaagccaggtcaaatctacataaatgagcggtagctcattctatgattattcaggggaaaaaaaatttgttagaggtgataatgaccatgggataaatagaagagctagaacaaacataaaacaacacatccttttgtcttttcggcaagagatgaaatgaggagtgtcgggcttcatgcccagtttttctgaaaaatgtagtaaacagggaaatccagtcatgtgcccagtcctatcactgtcttccttgagtcttggctttctgaaacttttgcatttctttggtatatagttactttccccaacaaagtgacagggcacgtgtcccctttctccttcaactcttggatttattatcagtatgtattattcatcctactctttcacatgttcgtttactacttctgttccagcctaacactgctctcttcctgtcattgaacaaataagtctacctttacactaatcatgtacttctctgaggatttcacaatctccttctgccaaataatgcattttggttaaacatatatatttgtgaaagtatcatctgctgactgtacttactctactgttttaccaagtaatccccaaagacaacatgttctttaaacgagtcttttaaaagtaggcatttttttcatctttttctgtttttaatataacaaaatattgcacgccatttataaaaagtcaaacaatacagaaatatatatcataatggaggcgactctccttgccccttactcaattctgtgcccctcccgaggtaactactgccaacggtttggtgtgtagccttccagatccattcttctgtgcatttccatctgttttacacacatgtgaacacacatgtgcatgcacaatgcacagtaatcatcaatttaatttcagtggaataattctgtacttttttttcactgaccacagcctggagatttctccctgccactaaatatatttctaacttcatcctttttttcagcttcagagaattctattacatgactatatcgtgattaatggaatagctgtgcattcaagtagcttctcattttttactatcacaatcttcaataaacatgggtcaattttttttttttttttttttttgagacagagtctcactctgtcacccaggctggagtgcgtgatctcggctcaatgcaacctctgcctaccaggttcaagcgattctcctgcctcagcctcttgagtagctgagactacaggtgcgtgccaccacacccagctaattttttgtatttttagtagagatggagtttcaccatgttagccaggatggtctcgatctcctgacctcattatccacccacttcggcctcccagagtgctggaagtgtcaatattcttatgtgatagattcctaaatgtgaaatagcagtcaaaagttatgatagctactgcccaattactgtccataaaagactcaaagacaaatatccccacattgtttgagaatgtctgtgttcccacacccttgccaatcctgaattctttttttttttcttttttcccaagatggagtcttgctctgttacccaggctagagtacaatggcgcgatctctgctcactgcaacctccacctcccgggttcaagcaattctccctgcctcagactagtgagtagctgggattacaagcgcccaccaccacccctggctaattttggtattttttagtagagacgggttttcaccatgttagccaggctggtcttgaactcctgacttcaggtgatccacctgccttggcctcccaaagtgttgggattacaggcatgagccaccatgcacagccccaatcctaaattcttatctgactttttaatatgtggatattaatgaatgaaaaaaaggttattccttttccaatttccttttcctgaatatgagtgaaatttcgcatctttttaggcattttcagtaatttatatttatttgcctataaatttctttatcaatttttcccactgtcttatttcaatcagtttatagaaatgctatatattatgacaaattatcaatggtcaactctttatgcaaaactattttctcctagtctgttgtttatcatcttactttgcttatgatatttccttgcctagtcccaaatttcaaaacaatttttcaatattgtatttcaataccttcagagtgttgttttttatattaacactcttattccatctgagtgtcccgtgtcctatttacactctgcgtttgtttactgaattgtggttactcaggctttctgttgggaagaatgactcatttttgcagtaccttccgtgtgtcatagcttaaagtatcttttgctctggtttctggaaataggatccatctgcttaatgaagtcaaccctcactggtagctcctttcttttttctagcactaatgtgtttatttgcatttttatattttctcttttatttcaatggaattttggaagaaaataggatatgaatgcgtatgctcactgtgctatctggaatggaagcatctgtgtatgtgtggccacagaaacatttttattatgagataaagatatacacataatggaaaatttggaaaatacaaaaagatacaaagaaataaattcaaccaacattccactactatattacaaaaagtgttaagatgttgatgaactctcttccagtgtttctaatgcatgtacataaaattttcatagaaattagaatcatagcaaatatatttagtcttgtactgtgttttttaaactcatattctgtgaagtgtacttcatacccttgaaaaacatgattttataaagatggctgtagagtactccatcggcacatacttcttaggaattaaagatcaatttattttgattaatatacttgtttcctaaaaaggtactacttcacatgattcagtggagtggaaagtctctttcccatccctgactctcagtgacccagtttcccttcctgaaaggccacagacaatacctgggtatttggtaaagataaaggtggaattgggtcagaggatatatccctttctaattcctgaaacatatttgttttccagaaatgtataatttatacccccatatgaaggcattcttttaaaaaaaaaaaaaaactttcaatttgtaaggtaagaaatgttttcatatgcatctctttggccctaagatcaaagaaattgagaataagattaaaccactttttcatgtttattagcccatgacacatgttctatcataaactgtccattcctagcctttgccaaaagagaccctttagaaatcctttcccagctttcaggattatggtcagtcctctgagtttcccccacatcaagtcaaagcaggaccctttccaaccagcagggcctctggcttctttcactgcgtcaccggtgcatcccccactactcactctcatcttttgtactgatgagatttctaataatgctccaaatttctttcttgaggtccacccagggcttctgaccagaaagaagagtgacagcctaggattctgctcagagaagccatgaagataataggaggctggtgtttcccagtgtccactcatctgaactcttgcaggcaggctgcaccatcaagggcccattacccgacgtctctctgcctcagtccactctcactcccaggtgctgctcacctccacaccttagcccattctggaaggccctttgagtccaactgcctctcctcctgcaggctggttgtggactctggaagcacctggggtgcatgtctatcacccgcactgtttatgaatgtgtctcccttctccctcagaagccctgcaactccccagagccccacacagcagtgtcgctgtgtggtgacggctgacttgaaaccaatgcacgcacatttacccactcaccttcccacacgcctcgcatagcttgccacagctcgctgctgctgcctaaagcacacaagtaacctcttaagtactgaaaagacagtcgagggtttcccctgcacctacttttccaagcttatacgacctgcctgtttcttctgtcacccaaataaagaacaaatgtgcagttcctctactccagacctgtcccagatatgggctggctaaggctgctcttcgacccctcaccacttttcctgtcctactcagccccgggataaatttcaaacccaatctcatcatgactcccctgtttttctttcaacatcccataatttattgtcatttctgcccctcattgcccccagaaaagttcaccctctattattagcatctcagtggtgtcttgtgcttatattaactcttttattgatttattaatgaatgtttttcctttttttttttcttgacagatatatcatcgctgttatcttctggatcgctgtacacccagatgcttaatatatcttgattgggtcagagtgcctggtgactcttacgctagcctcatttctcggcttcatcttgttagaacaaatttcctcgccctcttctcctaggccgcctgccagcgccgcacccactcctgcccctgcctgcaccccacccacttcccggggacttccgagcccacgcccacatcctttacctccaaggggcaaggaagctgttgacttaagatcccatgtggagcagtcagatgctgctggagaactccccgcactgcaggctccagacacacgacctggcccctcccccgtggacgcctatactgctctgttctctaattccagggttcccaacctcggggttgtgccttgcaaatacctgggaaacttttctagctaatgcctaggcccctaccaacccagaaattcccatctaataatctagggtacagcctaggcattgaaacgttaagcctaagagaaatccggcgcacgcatccagtttccaccaccgaatttccagcttcttaaatctgcaggtccagaaaaagaagatgggagtgctgcccacgtcgcgcrctggggctacggccggccccacccctggcgctgccgcggcagtcccgcccttggacttgggcggcgcctggataaacacctgaacctgactgagctccgagccagggactcgggtgcctggggcagacgaggccggcttctccgcggacagctagggagagtgtcctgggtaagttgccgaggtcgtcggtcctgggtgctggctcccggaggaggtcgcgctggcgggggtcgggcgaggccgccctttgggctggtttcacgctgggtcgctcgcaagggggcgcgggtcgccgagccgcggcaggacccacccgcgagctggtgagaaagcagctgcaccgggtagcgcacggctgagcgtcccagaagcccgggctcccgtggctacggctaacgcagacccctcgcccccgggggtgagctgccagcctccctccccacccggagcagagggcaggatgcctccccggaccctcttcttcggtccgttctgcccaggttccctgctctctgctgctcagtgcatccaccttccgggtggatatcaacccccatatcacccctttcaacccaagctgtgattgtcagtctgtctgccctcccgtttcgtccgggtgccctcaccagagccgacttgctgccgcgcactggtatgggaagccgagggcgcctgtttggattgggtaggccgcgagatagggacacctagaagacttctgccagattaaattgtatacgctccgtaacattctaggaaagtctttgcagtaaaatggaaccgtacattcactcttgtttgtaagtatactataaccatatttaattgatatagccagggattattaattcatatgcttaacaggaccagtggaagttctagccattaattattttgctgtcattctgtgcctggcactgttctagaaaggcctccatgttttatggctgtgccacattattatggggattgaggagcagagggggagacatgtaagctggcaggtgttgaaatccaaacagctcctcttgcaccccctccccaaccccttgcaccccgcagaggactttgtgcagggcaatgccttttttttttttttttttctaatttgttcgaaggtttcacacaagctagtagtgaccacataatgctccttaaaactttacctatataaactggtttaattctcacagctcctctgtgtggtaagtattcctatgcactattagaaactccctttttagaggaggaaactgaggcacaagagattaaatcatttctaccaaagttgcagggaaaatcagtgatatatctggaattccaacccaaactttaatctctagacctcattgcctgtgtgggtacccagcaggcaccctaaacttcaactggggaagggaggtaactcaggctracaagctcttagaaatctagtaagcatctgccaagacagggttaaaagatggacatattttaggtcttgcatcaagccaacattgagacagtggaacactgaaatctagaatgtcctgacattaagagcgttcatgtcacccaggtcaatgttgagacttctggccactgctgaggtgctggagccctgtgatgggagaagtagacctctgtccctctatgtgaattcacatagtgatataaaagggaatgtggtggtctgaccaactactcctggtgtggattttccaaagttggcgacgcccaggctgctgtctgagaagggcgcctagggtttcccattactgtgtgcacagtctgaccctcatccttgcagatccacaggtacaggctccatgtatttgatatgagagtcctctttcaggacaccttttcaagttctgcagtgcctgagaggcctgatcaatcattcaaaagttactctgtgaatgtaaatcagagcaaagatcacagagagtttgaggtctatttcatcaaagcatggatgaaaacgttcttcatttgaccagagcatccatgttccttagagcaaacattcttattctctggacagccctggacacacaggtcaaacctgccttaaaacaaactattttgtccctctgccaggaaagctactgctcaatatccctacctcccaccatcatcatttggatatccactcaaagggtcactttccagcagacatctgttgcttcctctcccaagcccaatctgaatcagctctccgatcatcctctccatagcacactgcacttttctttataacactatggcttataacgatctgtttatttgttgaatacgtctcttcaactagattacttggctcacctgcacagagattatgagaggctgcccatcccctcagccccagtgcccagatagaaccagcacagggtggatactcaataaacataacacatgaaccaatctggccctcaccagctaaccagcacagggaccctgaacaagtcacatacatcttctcttcgatcctcagtctcatctgtacaataagccaggaacaacagcctgggttgcatcgactctcgacatttcctaagggtgtgaccacataccaagtcctcctgtagatgaatctatccacccttactcattaaccgcaactaggctgacttcagccaaactgtgaagacctgctcttttttcattactcccctcctgtctcctcacacctgtgcctttgtctgagcctctcaattaaacaccccattcagagaaggctcccacccccagcacagtatgctgtctgctaaatatgtcttctgttcccatcctgaaggaaataagaccttcccttctttctcagctagtggttagtaaagcacaccttatatattcattcacactaaagtgtgagtaactggtagcaggatgtaagcactaagctctgtatgagtttgtcaaggggaggccttttattcattcagcagacctagtggatgccttcttggtgggcagcactatgaatctgagaaatgtgataacatctgtaaagcactgactataagccaggcattgtggtcatacgtggaacattctcatttcatctgcaaaaacaccctatgccacgggaccaatatagatgaagagaccaaggcccagtgtaaggccaagagaacccccgccatggggttcacaggtaggcagaggcagtgcagggcaggagtccaggtctgcctcgcctgtgacctttaatcacacagagtggtaagtgatatagagctgttggtgcggggacctcagagcctagggaagggctatctggtgctgattgcaaatctgtcggaaaaggtctagaacatctggttacttcctgtcaaatgctttctacaaataggactttacattttcctctcaaatctcagattttaaatagtaatgcaaaattaacgagaatgcaaatgagaaagcacaaacatcaaaggagagaaacataaagccagagaggtagtaatgatgttataaacattgtgatgtggtcaagactttgaacataaaatcagccaacaggattcattattattatgaagaaaggctaactatgagcaataatgaacttattcttttgtgttaaatttgggtgtggtggttacagttcctggttaacaaacatttctgttgtgtactgcacatagcaggcatgcaaataacatgctgagcctggggccaagtaagaaagccgaataagtatagtccctgtggcttcctcctcccactttctgaatacagagtctgctaccaggagagctgtttaaatcacatatctcagttactttcactgtttcagaaaataggagctccgtggagtaaacaactcagaggaaatggacaaataagtcttcatgtgaatctgtctttcttcacaggtgtcagccagaacatgtctttcaacctgcaatcatcaaagaaactgttcattttcttaggaaaatcactgtttagtcttctggaggctatgatttttgccttactcccaaagccacggaagaacgttgctggtgaaatagtcctcatcacaggtgctggaagtggactcggaaggctcttagccttgcagtttgcccggctgggatctgttcttgttctctgggatatcaataaggaggggaatgaggaaacatgtaagatggctcgggaagctggagccacaagagtgcacgcctatacctgcgattgcagccaaaaggaaggagtgtatagagtagccgaccaggtaactcttgtgtgtttactattataatttgatacacatcacactctttttcacttgcctttctcagtgcctattagcctgtctccagtgtccctttaatgtaaacaagattatgggagaatgggaattgggatttttgaattcttattgtatgcaaagacactgtactaactaccatgtatgtattataaccttataaagtaaaacccattattatccctatttcacaagtaaggagactaaggcttagggcaggkatgtagctgccctaagaaacacagttagtaaacagcaagactatagctgccacttgcatctattgacacctgagtacctgcttctaacattacactgcacggaccataccggcccctattacagtgtaagttaatggagggatagaggcatccttctttaagaataaggactcgagatacagagacattaaataacctgtccagcggtcacagacctggtgtgtgatggaagcaggatttgaatccatattctgtctgattttaaatttaggctgtgtccactccaccacagtaccctacgttcgaatgtgtattgctcttaagtagtcataagacaatcagaatcttttattaatcctaaagactcagctatattttcttctttggggtttatacagatacacacataaagctttcaggaaaccaaagctctgacatgaagatggtagggattttcttaccatcatagaggcacgtgcccgtccctcacaaggaattttttttttttttttgagatggagtttcactcttgttgcccagactggagtgcaatggcaccatctcggctcaccacaacctctgtctcctgggttcgagcgattctcttgcytcagccccccgagtagctgggattacaggcctgtgccaccatgcctggctaattgttttgtatttttagtagagacggggtttctccatgttggtcaggctggtcgaactcccgacctcaggtgatccacccactttggcctcccaaagtgctgggattacaggcatgagccactgtgcccggcctaaggatttttgtgtcctcatattggcttgagtacttcactcatcactctcctgggacactttgtgcctcccagaattgcccaacttattgagaagggaagaaccaaccaagcctgccgtgagcagcctgactacattgtaaagttgctccttagcttctaggctcaatcaggatttccttgctaaggtttgcaggtccctggcagataagtttatgactttcaagtttgtctttacattttacctctctgccaccaccatctccaaacacaggctgcccagtacaggctggagatccacacctgacaaatttgctcgggcctacgctgggcccactcttccaagcacagctgatctcacaaattcagctacttagaagttaagcactgatcacctggcatgttgacttacactgactacaatttatctggccagcyttaagcaataaccggttgatgttcaaacgatgaagattgttagctatgggataaactagtatgaagcactctataaataattacttcccttttccctgtaactgtgatttagttctgccccaggtgcttgacttcagaaacagccaaacatgtcatattactagcttattattcaggttttatcactgtggggtcttgagggaattacttatgtgctcctctgaattcaggggaaggaaattactccccatccttataaacccaccatttccactttttattctggatagaaaggaaagtaccagataatttttttttttgagacagagtcttgctctgtcgccaggctggwgtgcagtggcatgatcttggctcactgcaaactccacctcccgggttcaagcggtactcctgcctcagcctcccaagtagctgggactacaggtgcacgctaccacgcccagctaatttttgtatttttagtagagacggggtttcaccatgttggccaggatggtctccatctcttgacatcattatccacccgcctcggcctcccaaagtgctgggattacaggtgtgagctaccgcgcccggccaataccagagagtttttaagaagtagcccttagacgagcaatcaaagagaaagctttcagagtgatatgacagcgttttgtctctgctgagtctccaataactttgaaagcttgtatccctaggccatagcttagccttgagttcaggaagtccatccttggaaagaagaaaaccagccagttgatgaaaacaggacaggcagattctaatctgtgctgtgtgtttaaaatatatacagtcgtgcaccatataatgacattttggtcagtgatggaccatatacaaaatggtggtcccacattatgggacagattattacagtatttttactgtcccaatgttctatgattagatacacaaatacttaaccaatgtgttaacagttgcctacagtgttcagtatagtaacacactgtacaggtgggtagcctaggagcaataggctctaccatatggcctaagatgtgtagtagscacacatctaggtttattaagtacactctgtgatcttcacatagcaaccaagtcacctaacaatgcacttctcagaatgtatctccattgttaagtgatttatgactgtactttctcttttcctctatttattccctaatccagccccttctccgtgtgtgaggtcttgatctatgtcacatttggctataatgaagctattcttatgtcccatcatattgattaaaatgaaatgccacatacagagcacagaacaaagttactaaccactgagtagaagaacagctctaactgtaaacagaaagtagcattttgaacatggactcattttaagaagagaaaaatgggaaaagcacatcaaaacttgatctctggaggtcaggcgcagtggctcatgcctgtaatcccaacactttgggaggccaagacgggtggatcatgaggtcaggagatcgagaccatcctggctaacacggtgaaaacctgtctctactaaaaatacaaaaaattagccgggtgtggtggtgggcacctgtagtcctagctacttgggaggctgaggcgggagaatggtgggaacccaggaggcggagcttgcagtgagccaagatcgtgccactgcactccagcctggtcgacagagcaagactccatctcaaaaaaaaaaaaaaaaacttggtgtgtggtgcattgtagactcagcaatggaaataaaccaacctgtatttatttctttatttatttttttagatgcagtctcactctgtcacccaggctggagtgcagtggtgtgatcttggctcactacaacctccacctccctggtttaagcaattctcctgcctcagcctcccgagtagctggggctagaggcacgcatcaccatgcctggctaatttttgtaattttaatagagacaggattttgccatgttggccaggctggtctcaaactcctgtcctcaagtcacccccctgcctcggcctgccagagtgctgggattacaggtgtgagccactgcgcctggccccaagctgtatttttagagtgcataaactcagtatgaattaaccaggataaaaaaaacataaaactctgggaaaataaaacctagcccatgtaaggaattactacattggtggtgttgctcttattcaattcaggttaaaaaagaagtcggcgatgtttccatcctaatcaacaatgccggaatcgtaacaggcaaaaagttccttgactgtccagatgagcttatggaaaagtcatttgatgtgaatttcaaagcacatttatgggtaataattgtttcttctcatcataaatgtaaaattattctggcatttggaagtattttcctcttgctcttttacaatattattagcctctaagtaaagcagagacttctcagttttggacttgtcctgttctacacagttgtccttttctgatgccacttaatctacagcccccaggacctctgcttagggaattctacaaggacagaactgtcctcatggtcctgctaccatgtattgattagctgcaaatgttaggaaatactccaggtggctcacatattttccttaaaacagctcggtgagataagggatcatagaacttaaaagatttgctccaggctacatagcgagcaactgcacttagacaggaccagggtagctttgtaatttgcctaagctgggacacttttggaagtgaaattcagcattattaatgagcaagtgttaatcaggtctgttatgggcaaaccaaaacctatagtcaccttagttagtacccaaccagagaaattagaggttccactggtaacccaggttaccacctgctaccagcgctaaaagcacagtcctgacttctaaagccacccactcaattccagaagttgcatgtttctggcctttgctgagaccagccatctcaggcctccccacactatgcatgcaccctcttgctgcctctcccagcttttattaaaagttgtatttttattttactttatcattttattttaattttttgagacagagtctcattctgtctcccaggctggagttcagtggtgtgatctcagctcactgcaacctccaacctcccggattcaagcgattctcgtgcctcagccacctgagtagctgggattacaggtgcgcgccaccacacccaactaattttttgtgtttttagtagagacagggtttcaccacattggccaagctggtcttgaactcctggcctcaagtgttccgcctgccttggcctcccacagtgctgggatcacaggacttttgacctgtttggttccagccctgctcgtagctcgtcattcctgggcaaggctctctcttgggagtctttgctggagatttctgagctcctcctccattctcctcacacctttccacccaagtcttctttagcagccttcaaatgtaatttggaatttgtagattttctgtcccctatttccaccaaaaatgtaatggtgctggtgctattcttggtgttttgtaaagttttcaggagaaaaatggaaagattcagaatttagtggctaccatgttcctacaagaactactgcaaatgatttatcttgtcccaaatgtccctctccttggtgcttgcttatactcatatatagtcagaatgaagataaagaccatggtccctggaagtctccactcccatggctttgtgttctttttcttttttttttttttgagatagagtatcactttgccgccaggctggagtgcagtggcgcgatctcggctcactgcaacctccacctcccgggttcaagcaattctcctacctcagcctcccaggtatctgggactatgggcgcacgccaccacacccagctaatttttgtacttttagtagagacagggttttgccatgttggccaggctggtctccatctcttgaccttgtgatccgcccgcctcagcctcccaaagtgcttggattacaggtgtgagccactgcgcttggcctggctttgtgttcttttcctacctctctgtttttccccaggtgccttcatggtgtctgtctctctcttttcttcttttcttcttcttcctcttcctccttcctcctcctcctccttcctcctcctccttcctcctcctcctccttcctcctcctcctccttcctcctcctcctccttcctcctcctcctcttttccctcctccctcctccttctttttccttctccnnnnnnnnnnnnnnnnnnnngaaggggggggaggatcacggagggggagtggggaaggggaataagaagagagagcaaggtgggcatggaatcatgggggggcaggcccagataagggatgggggactgggcgcaactatcctacgtggctgagtcggggtccataggatatcgcgaggaaggcagaggaggctccggcagagagtcatgcgggggggagtcagggggatggggtagggcgggctgatcatcatgccgcgtgcgggtcggcgaggctcgtgttcatcgatcgggatggtgctcattcctcctcctcctcgttcgtcctcctcctcgttcgtcctcctcgtccttcctcctcctcctccttcctcctcctcctccttcctcctcctccttcctcctcctcctcctccctcctcctcctccttcctcctcctcctcctccctcctcctcctccttccttctcctcctccttcctcctcttcctccttcttcttcttcctccaactccaactcctcctctacctcctcttcctcttcctcctcttccttcagtgctggtgtttccctggctcctaccactcctcatgtcatctcactccctttacttcttctgggcaagttcatgtacattctttgagcatctgcacattgccaggcacaaagacagtgacttaactgctagagcgtccaagagctacctgaaggctgggctctcaaaggcagtgtccctactgagaagtgtcccaactcatggcagaccccagagtgtttgctgcactgcttccttttgctttgttttgatttcccacctctctctacctgttagtttctctctgagacttattgcaatgcaggcaaacaagtgaggtttggcctttgtaagagatcccttttctcacctccttgtctttggtgtgattagttactcctttgatgcagaagatgtcttccttaaaagctcatttctgtctcttttaccttctttctccaggcccccartcaagggtgaaggtgttggacagaatacagatgtgtcctctttctaatagatattctgttttaygaaatggaacaaaaataagagatgagtttaaaacaaagtgctcttttaaaattgaagtcaacagccagatgtcctgtgaacaatgttcagggaaaatttgaaactcaaaatcaagctaagcagagagaaggcaatctaaatctaaagcatcatgtttgtgaggtttggggttgtggctgccacaacaaagatttactccttcaattcttgtyttaatattgtgtcgttaaaagtcaaatatgagcaaaaacataagtctgaataaattattttaataatactggaattgccataaaaaactgatttaacaggttaaataagttaaaatgattactttccagatgtttaagtttttatatccccataccttcagatattttacaggctgaaaaaaaaagattttttaatcacaatgagtatataaatatctgagaaaattatacaatgtggcattaaacattaaaagttttcctttgtattcttagacttataaagcctttctacctgctatgattgctaatgaccatggacatttggtttgcatttcaagttcagctggattaagtggagtaaatgggctggcaggtaagaaaaacatagcaatttacaattgcaaaattccctataactttaacttacacaatagctctgaataattagcactgacttgatgccctaagataaaggataataaactaaaaagtatagtcaataagtggttgataacttcatcgtgtagcaaaactgcccatcagatagacttacatgaaattggactatgccctttggaatcattaggtcttatgcagtaccctgtgtttaaaagagagagaggcctcactgataaattttttgcacaagtgatcaacaaaacaactgtccaccaaagttcacactgacactgtcacagatggtaaggaggatgaccctgtcttctcctgaagtttcctttaagtggtctccccactgctgtgagtttggataaagtttctrcacctcaagatacctaaagttaactgctttgtttttccactggttgaagacctgcaggaagtggtgggcattttcatctcccttgcaacaaccaactgacttgacagtagcagtggggagrgggcaaagagatccttcaagaccctcaaccaaggaggcccaacttgggagctggctctagaaggaatagaaatcttgacctaacctaccacagcatcccctagaggaaatgtcccaagtcctggcttacaaacattgctaaaactcatccaacagaactgtagcagcaacattcggataacagataagccagtttgccagttgggtggttcctaatgcttttgaagcaaagtggcgtagttcaagattcacaaaaccagtcttagctcagtatatctattacatgaataggtttttcaggaccaccagtcaccccaaatatcaccagtctatcctccttatgacccaggacttcccttcctctctccttcttagaacttatcaggtattattcttacctccctcttatatatctgttgtcacgggcctttgaaatcattcaggtatatttacagctccttatcaatccttttcagacagaacattcctgtcttgagatacaggactctcgcacctgcagctcatcttagaaacaagtataagccttttgtatttcccaccgtgtgagtctttactcccctgcatcagaaccaccggggtgccagtttagcatgcagattccttgggtcatgggccatatctgctcatcagaatctcaggggtcaagggactcagctgcatttatacctgatgactccaatgaccctagaagctgctctggactcctcgtcccccttcccagtctctagcctctgacccactgtctggacagcactagggctggacaaccccacgcctggcgcttataaactggctcttgccagttgcagtagctgcaccgtaacatagcaagtttaaatatgcctcctctgaatgtgtggagcaaaggaaagtgttaatgtacctcaatgccatttcttctccaaacttcttcacttagtcaactgaatagtcagatgttttgttaaaacaggtatgattaaagacaaaaagctgaaaatggacacaaatgccactttccactccttcctctgcccccaccctacattttcaaggtatttaagaggtggaggttgaagctaccaagccctttttttttttctggaagtgaaggaaagagttatagttggaagaaaacttcatctgagaatcacaacccatgctggcctctcttgcctagattcctatatcacttagtgttttatttcttcttttgaatgtcttcatgccccaatgggattgcaattttttgagacaaggcaccatgtaagaactagcacaggggctcmcaatgcatttacttgtaagtaaagtccagcagtgtgacctgagacaggatctctgcagcccttcttgtgctgggctctacttggtcattgtcaactgaccctgatcttcagttaaccatgtcccttcccactccctgctcacttcttccagtgggagtagaccaagattacacaaaaggagaactctgaaattgtcttattttctgtcgctgttagcgttatgggtaaaccttaatgtaatgccattttaaaactttggaatatacgttatcatgctttgtctttttcagattactgtgcaagtaaatttgcagcctttgggtttgctgaatctgtatttgtagaaacatttgtccaaaaacaaaaggggatcaaaaccacgattgtgtgccccttttttataaaaactggaatgtttgaaggttgtactacagggtaagtatgtcctttaatttcaaagaatctacactcttaaaaatgttttgctattttattttgttcttttttttaagttgtttaaaatatattgttctgggattcagtatgatttataaatggttttagaattctgtctttcttagtatgtgtttgtgtgaaggataccaagttgaatgggaatggtttatcaaggcagtgtctctcagctcccccaggccctggatctgctcctccatttcccagactctcagggccacatccccttcctgccatccaatcccattctgctccctctctgattccaggaggactagaaataactggagagacattgtcttggtcatatagaaggagctgctataatgaagtatcatacactaggtggcttaaacaagaaaaatgcctttctcacagttctggaggctagaagtccaagatcaaagtgctgataggctcttctcagacaggcactaatcccattcatgagggctccacactggtgacctagctacacctcaaaagccccacctccaaatgccgtcacattgggagtttaggcttcaacatgtgaatttttggggggacacaaatacccagtccgtagcagtcacagatgcccaattctgtatctcatggagactacaggcaatgtgttttcaacaacttgccttacaaatatttggaatatttgtttaatatggtttcacgtatatgtatattgtaatatcagtgtattaataatcatttttcatttcatattttagttatgttactacttactgcattgacacattgataataaaggagtaaatataaaaataaatgaaattgaaaagcaaagaaataagtgataacgtcttaaaaccttttatccctaatttgaaaaattatctttatttatgaatttggccttcagggttttttttaattgttgtcattttatatcctagctgtccttctctgttgccaattctggaaccaaaatatgcagttgaaaaaatagtagaagctattctacaagaaaaaatgtacttgtatatgccaaagttgttatacttcatgatgtttcttaaaaggtaattacatcagcttctattacttccctaacatgccagtctacagtttactccaaatcccaccaggagaagccactttaaaaatacctgataaattaaaattcattaatttaattctattaagtcctgttagtcctatcattgtgcccattgctgacacaataccaaatttacacagttgcagtgcccgccatgagtcaagaaaatggggtctaatccttcctgccaccttagtatcgaattattctgaaaaagaagtggatgtactgatagatggaaagatcgaaatgatttttttaggagagattttcttgcgctcatgataaaataatcctgttggaatagatattgtatccatgcctcctcaagtacagggtcccaaagtcaaggccagacagtaagccaagtgctatagaaatttgtggtatgggtacaattagcaatacataataaatttgagctcttaggatggttaaagaatttgagggaaaaaacttaaaaccacctcttaaaagcaaaagaacaggctgggagcagcagctcacgtttgtaatcccagcactttgggagtccaaggtgagaggattgcttgaggccaggagttcaagactagcttgggaaacaaaggaagaccccatctctccaaaaataatgaataaataagccaggcatggtggtgcacccctgtagtcccagctacttaggagtctgaggcaggaggattggttgagcccaggagtttgaggctggtatacacctatagtcccagctagtcaggaggctgaggcaggaggattgcttgaacccaggggtttgaggctgcagtgagccatgatcagaccactgcactccatcttggcaacagagtgagaccctgtctcttaaaaaataaaaaacgtacatggtggtgcacacctgtaatcccagctacccaggaggctgaggcaggagaawcgcttgaaacagggaggcagagtttgcagtgagctgagatcgcgcgattgccctccaacttgggcaataagagcaaaaactccgtctcaaaaaaaaaaaaagtgcaaaaaacattcttgtgcacccttccctgctctccatggagtttcagtgctgaaattcataggcactgaatgaacatttgacccacttacaaggatagtggtgagctgctgattcctgttatctcaattcattttctagactgtaacaggtcatctaattaaatctttcctcactgggctttctgctgtgtgaggaagcaccttgagttgaaatctgcctcatttgaacttcccctcattggtttgtgcttctcccccagctccatgtgcaattccatcagtcttgccaatgacaattcctagttatttgaagatagatattatacctcacttccactacatggccagcagccattgtccatcctgtgtacagaaatttcttttctcattagctaattatatctactttgtgcaatgaaccaaatgtcattcttgcatactatcatttttccaggcttcatctggcacaggatgggtcagaatgcctgactgaggctatgtgggacagagcaaaggatcctggacaagcaattcgaaattcaggcttacgatcccactattcactaagtctgtgactctgagcgtgccctttattctccaggtcttggcttcttcatttacattgtagagacaatgtttgtcgtagcttgtagattcgtgtaatgcactgtttattgggcagggtgtgcattcacaacacactaagttctttttgcttaatagatggcagattatagtatagtaatgccaatggtaagaacacggaacttaatttttctactttgaataactgtggagattatgtttagttttatgcaatactagttatgggacatgttttgagagagggctagatagctgctgagtaagctaaaggcaaggtgaagaagatcagtaaaggcaatcacatcaaacactccaccaaacattcattcagcaaatattcagagagtgctttgtgtgtcatgaatcacccaccatccaaggatctgcgcttagggttacaacaaagaacaagacaaacagtggtcyctgcccatgtggaaatcacttcctgtggggtgagggggcagaaaagaaacaaacaaaaaagtaaggtaaaagaaaagaccataagtgctctgaagaaatataaagcaggaaagggaaaaaaggaaaccccacagtgggaggtagatgggtgcaagttgagttttacttttttttttcttttttttttttttaaagatggagtttcgctcatcacccgggctggagtgcaatggcgcaatcttggctcactgcaacccccgccttccctggttcaagtgattctcctgtctcagcctctcgagtagctgggattacaggtgcccatcaccatgcctggctaatttttgtatttttagtagagatggggtttcaccacattggccaggctggtcttgaactctcgacctcaggtcatccacccacctcagcctcccaaagtgctgggattacaagcatgggccactgcacccggccaagatttacgttgttgttttttttttaattttactctttaattttttttggagacaaggtcttgttctgtcacccaggctagagtgcagtggcttgatcatagcccacagcagcctcaaactcccaggctcaagccatcctcccacctcagcctcccaaatagctgggactatagttgtgcaccrttatgcacagctaatttatttttatttttttagagatggggtcttgctatgttgcccaggctggtctcaaattcctggcttcaagcaatcctcccacctcagcctcccaaagcactgggattacaagcatgagccaccacatctaagtgagatttaattttttttttttttttttgagacggactcttgctctgttgcctaggctggagtgcagtggtgcaatcatgcctcactgcaacccccacctcccgggttcaagcgattctcctgcctcagcctcctgagtagctaggattacaggcgtgcaccaccacacctggctaatttttgtatttttagtagagatggggtttcaccatgttggccaggctggtctcaaactcctgaccttgtgatctgcccacctcagcctcctaaagcgctgggattacaggcgtgagccactgcgcccggccggtgagaattaattttaagaatggtgtttggtgggtggagggagtctcataaagaaggtagtacttgaccagagacttgaagctgtgggagggatgaaccacctggagatcttggggtgcccaaacaggggaacaaggagcatggggtcctttcctttacccccaccttaggatgagtctcaggtttcccgtgcctgctttgtttccttgctctgcagtatttaatgcaaaggccagtggagcagagtgctctgttgggatgatgatcatgcatgtatatggctttgcagaggggcaggtgtggatggagaagatggacagtgttagttgggtcttgcccaaggtttgaggagctattgcatctcatcctcacagtagcgccagaaaggcagactgatgacctcattttacagttgaggaaactgaggtctatgagctgagtcgattgcctaaggcggcactgcaaatgacagagctaggattccagccaggctcatctgcccccaaagcgcatgcctacasgacaagacttcactgcttcctctgtgtcattgtacagtggagtgatgctttggaaacygaaatgagaagtgaattgaataacttaagccagaagacctgtcaaggccctgggmgagtgtccccsgatatagtgaacaaggcccagtgaccctgaggcgggtagcactcaggctgcatagtgtgtgcatgagtgagtgacttcatctgccacaagaggtgacactgcttttcagtagaggtggtaaagaggctttcatgaatgataataaagaaagtttattcttgtgttctctttagctttttgcccctcaagacaggactgcttatagctgactatttgggcatccttcatgcaatggatggctttgttgaccaaaagaagaagctctaaagaccaactctatggctaaggtcatctgatacacagtgttacataatgcgtacttcaatgaagaaaagtatttttgtctgacagtggaatatatctggagaccacaagtaccactcctattctgttatctggactagaattttcaatcaatgtgtttgaaaataatgttgctatcacctatttggttgagttttggttttttctttttcttttttttyccaaaaataaagacagcccatttttgtcatttccattaccacagatgtaagaaagtgataagccatggccatgagctgccctgagctttggtcgttggggaggtggctcaaatggagccagcggctgtggttgacctgccttggggagcagggctgaggggcgaagaggacatgtggatatccagccagaatgccctctctccagaggacacacagctctggatttctacccccttgctatcctctctggccattttgaacctgtaccacctaatgtagaaaaggcccgcctccagtgcccttctttccaaaacagctacacaaatgcttctgaatgccctggatacgcagaccgagtggcagtctggctaaaggcccatccagcactattgtgcccaagagccttaccgggcattccctgaagccccctcataggcagtgatcctagaccaaactcttaaatagaatcacttttgtttcctagaagagatcaaagagtggttgcttcttactttgaagatgaaattataccaagttaggttttttgctatctattgatccaaaaaatatattcgtgcaattaaagttaagtgttcaacttagtatttcaagttgggattcaggttgaggcattttcctgcagaatgggcaattttatgcatttatattcatcagtgctgccctcactttggatctattgtattcttacagtttaatcaactggcaaagtgctttcatgctttggagattaactataaaagcaagattaagaaaaatatgttaattaccatatccctggaactccttctcaggctggtgggggcagccttgcaagagaaacagcagcctttgtctcttccctcttgtggggagcaaggaggggatgagcggtaccttgggagacccggtaaaagtctaaagaattgagaatttgactatcttgggggtaaaatgctgtcataggggcagcagtctcagggggtgtaaactctggaatccactatggtttaccttgagtggcctgcacgaacatgacagccctgatctgtatttcctttccattcagaaaaccttaaaaaaaaaaaacttgttttatgataatattataacaatcataactaacatttactgtgcccggcagcaaattaagtatttgacaaacattatttcattaaacgagactgtcaatcattactcaaagaatgatgaaggtatttggtgtatgccaaagaataaaggcgttttatttcacagtgacatcttattccactgtagatgtatactgagaggatcaaaggccctctcagagtcacccactgatgttccaaatccttggttaacaaggttaattaagagagaagcacaatattgctgtaatattacaattccagaagcgtatcttctagggtcctgtctatttagttaaagaataaagctcagactcttcggggattcagtacaacaaaggtccaggagcactgcaggcatcctccacatcataacagcattaatagcaattatttctaattggagtgcatcttggctggactgcgacaaaggcctgaaattcaattgtggttttaaaatacccataaaattgtctaaacaaattcagatttacttgagatgcttctatgagaagagaccacatgtaaattagtggattctagagggcactaaataacaaggtgatttaatgccctggggagcaaggagtgctcttggcatgtgtgtcatgcccgtttccatcaaaatttagtcctaatgaagccatgaccaagagcccaacacctaagccaggctgaggaaacagaaggacacagggccagggctgtgccccatgcctgggcattctgccctgcagggcgcatcttccagcatcttgtactcactgagctgctccaaagcagagaagaattcttggtgtaagatggagttttgctgggtaaaaatgtgtgtcatgccgtgtgtgtgtgtgtgtgtgtgtgtgtgtgtgtgtggttttacattgtgatgctgtcttagtccattagggccaccataacaaaatgccacaaattgagtactttaaacaacagaaatttaattctcagaattctggaagctaggagttcaagatcaaggtgccagctggttcattttctggtgagggctctcttgctggcttgtggagaacttcttgctgtgtcttcacagagtctttccttggtgtgtgtgtgtggagagagagagagaaagacatatttcttcttctaaggacaccagttccatcataagggctctactttcttgacctcatctaaccctaattacctcccaaagtcccacatcatcccatatgaattttggggtaacacagacatgcagtccataacagatgccaagatagaaaaaaaccagaccacaaatgacatttacactccttagagtcctcatgctgagatggtcacagttcatcagatgaaataattctgaatcttggaggcagagtgaattgagaatgcctgaaagaaattaattccaacctgccagagtcagcacttgagaaaaatatgactgaaaatctgggccaccagacaaaaactgttgtgaagccagacgtcccatgcagagcagctctgggacgaacatgtctggtgctaggcaccctcaacattccaggctcatgaaccatgttggaccgggagcagggctcacatatgtaattccagctctttgggaggccaaggcaggaggatagcttgaggccaggaattcaagaccagcctgggcaacacagcaagaccctgtttctacaaaaaatttaaatattagcccgatgtggtggtgcacacttgtagtcccagctactcaggaggctaaggtaggaggattgctggagcccaggagttcaaggcagcagtgagctatgatcacaccactgtaccccaacctgggtgacagagtgagactttgtctctaaaatattaaataaaaaataagtaaaatgcagcctcaggtaatttgtccatctctttgattcacattggcttctaagccccccagctttcatgtctaccatgtcatggtgatttttatggaaagatccccagggatttcattcctcatgagattttatttctcatgactgacattagtaatctctcaaccaggtggtcctggtgacacttctacctactggtctcttctgctgttcactccttaaattgtttgtgttcttcaagtttctatctttggatttctttgactttgtagattccttctgaggactcttaaccatgcccattgctcctccacaccatccaagctagaaacccaggtataatgctctacttttactttatctgtcatctccttgtccaatcagtaattaaatccagtctgtgctacctctcgacctcattagcatgttgtcctcaccatcccaactgctattgccttagttcagactctcattgtcagttccctgccggggcaatagtttcctggccactctttctgcatcaaggcttgcttgctctgtcagcgaggatttcattcagctggggtaactgaaaactccagtgtaataagggcttgaagaaagtagaagtgtgtttctccgttatgtttaaaagccttggggtagccattaagggttggtagggtgctccacagagtcagggacccaagctccttctgtgcatttgctcggctatgcaggctcacgtcctgaacatcagtgataagtgtgatctacagtgaccactgaaacctcagccattatgctcacattccaggccgcaagaccccagagggcataaggcacccctgcactctttcagtacaatctgtgggcattgcacaccccaaaacaccacatcctattggtcagatttcatcacatgactaaagcagccctcaaatgatgctgagaaatatggtctttattttgcaccaccctgagccacctaaacaccagggatcctattactgtgggaaaagataagatccagatgttggatgttaacttaaaagtttctgccacagtcttccccatacatttatgtattctcttctaatcagacagaacgcacagaccctctccactgtaaagatctgcccagtcactgcaggtcaccagaagtccagaacctatggcgctaggcagcaccctccatcagatcctaatatgactcttcatggccgaatgaccaagaagagacaaggtgagtgattcacccccatctcactctacatacagtggtgcagagaagcagaatagccatgattagagtcagaaatgagaaggaaaggagacaggaggagaaagaaagggaggggaaggaaggggaggagaggggtaaaaaaaagaaaagagaaggggaggggaaggaaaagacgagaagagaggaggggattcgagggaaggggagaagagaaggggaagagggaggggagcagaatgaggggaggccaggagactttccattcaaaaccaggaaggggacagaagaaacacagtgatggtccacaatgatgggattttgctgggcaggaatcacaagtgcttcctttctcaggcagccctgcttgcttctactctgtgatatgccatcttgtccattgtcctccatgaacctagagggttctttgttgtttaacattttccccgcagctgaggtgagctttgcagactatattctctctcaaggctacacagattgtatagtctcaaactagagggaagaagaattatagcctgtgtcaaggctgtcttcacttttgcaatacaattggctccaataactcaattggcttcttgtgtatttatttcatcctcctcattggccgtttaaaccactgccacagatcttgcttggacgaagctttaagactgaaagctgctctgtaactggcacctgtgctctgcccatgcctgcctctgtctctggtagatgtggtgggaaaggtttaggggaaaggccatacccatggtgtgatgtttattgctgactggatcccaggtctggcagtcaacccttaacggaaggtgctggggaaaaacttaggaccacaatgtttcttcccctaaggccattgtctgggatctacacttctgagggcctcccatcaggcacagagggtgttggctgtttcaaccctccaaggctccaaattgccatgctctcagtcaacttggcttgcaggtagagagggctgggttccctccctcctctgcttgcatgctatgctttccagactgagctcccttctgtgagtttctgctcaaagctgcagagcacccaagccacagaaaaattctgaatttgtcttaccttttcccttcatgctacagtcatactcagcaggtaatacattttccaaggtagagtaggatccatttgaaccaaatgtttccactgccaaacaagtatgcccagatttctgcagaatctggaagattctgaacacttaccacctctcacctacgacacgaccttcattataccacatatttccatttccgttatgggcagcacttcctgtatggtactaagttctatattcactataactgtggccccaagtaaacagccatgtaaaagctatgaaagtctgctcttgtcaggtgaaagtccagaggaagacaaaccatgtcttctatgttggttctgctataacaagaaggaacccaggctactgacagctcctcgctctgccatcccaagaatgtgaccatcatcattagggtcaagagagcagcagacctaggaagggataaagacgaaagcaatcaaggcaccgatttgccttttaagaatatttctattccctagaaagcagacccacattaaaaaaacataataaaaagactatttctagaagctcacacaacactcccctcaaatactattagttgagatgcaaggatgcaagggagacaggtgattgtagtttctaggacagtagccatgattctgtcgaatgactgtgaagatttctaagagtaggaaagcaggcatcagtaatcttggccatgggctctctcaagtc

SEQ ID NO: 93958 - DNA, 261933 bp, Homo sapiens
  misc_feature (1)...(261933): n = A,T,C or G
actttgggaggctgaggtgggtggatcacttgaggccaggagttcaagaccaacctgggcaatatggtgaaactccatctctactaaaattccaaaaattagccaggcgtggtggtggatgcctgcaatctcagctgctcaggaggctgaggcatgagaatcacttgaacccaggaggcggaggttgcagtgagctgaaattgcatcactgcactccagcctgggtgacagagcgagactctgtctccaaataaatatatatataaacaaataaaaattaaaaaaaggcttcataatcatttgactccaaaaggagaactagcaaaccaatcaaagagctgtttactgatatgagatttatactgatatgaaatgtataaaactctttagtctacatgcctcacaaagtacaattaatccgtgaagaaaaaaggtgtaagaagagacagagaggctgggcgcggtggctcatgcctgtaatcccagaactttgggaggctgaggcaggcgggtcacagggtcaggagatctagaccatcctggctaacatggtgaaacctgcctctactaaaaatacaaaaaattacccgggtatagtggcatgtgcctgtagtcccagttacttgggaggctgaggcagaagaatcacttgaacccgggaggcggaggctgcagtgagccgagacagtgccactgcactccagcctgggcgacagagcgagactccgtcaccccctcccccaaaaaaagaaaaaaaaaatagaagagacagagaaatttgtttaagaagagacagaaatttaattacctaatgaaacagaatgaagactgtattagcttaatctgtttagtactatttctgctcagcagcagttatagtaatcaaccctctaattattcattatttacctatgatgggtataactttgaactcaatgttagagaagccatagggatgaatcaagcccctacagggatatccaatcttctggctttgctgggccacactgttttgggccacacttgcactgtacttttacagcactgtcacacctattatctcaatttttgctgggtttaaacagtttatctataccttgccatccaacttaatggcacaatttaacattattatactttraagcattattttgaattgaaagraggttaacataacagtggtgtgagtttaagagaattttaataagggcttaaaaatcacttttgtcccctttcttaagtagtattttcatgtattgcttaaagttttatgagggcataaactatagaatacactgaaatacactaacactaataatagctgatgagctttaaaaaaaaatcacaaaaaaactcataatgttttaagaaagtttacgagtctgtgttgggctgcattcagtcgtcctgagctgcatgcagcccatgggaagcgacactatactagtttatctatggtaatgcaaccacagctgtaatccatgatagaatgtgccaggttccataaaagacacagagctctatttaataagcatgaagaagtggcagggaagagtttcagccaagagatcaggaaagcttcccataggtagttacaggcaatataggaggtaataacaaaggctcgtaggtaggaaagcacttgagaggttcacagaataattggccaagtcagatttttgcaggattgtagaatgcatgaggggagtggtggaaggaaagagtagaaagagtgatttggtcatgcttgggagtgtgcactgcattctcgcagagagagatggggagacttggcatttttaacactttagaagcttaagaaaccttagccttcaactccattatggagacacaaaaactgaacctccaaaaggttaagtggcttgaagagaactacaaaattcacagataggggtcaagaactaagttcatgcctcccaccaatgataggatcagatatatgattcaggaaaattattttagcagcaatgtgcaatatagactagagagaaaacaaattacctatagtctagtttaggaataaagaaaaattggatgtaattgagaattcttctattactaagatactatcataatgtgttttaaaaatcttattcactgtgatgtgccagactgaaatgttagcttggccacagaaaaattccctaccttggctatagggcttcagtgaaggagataataagaaaacagttttgtgccaattacatcagtaacatacgttgccacttgtgccagttcagctcttcatggagagtggtgaatcactgacatgaatgttggaggtaatttcaacaactgtgaatgggaaaagcagttttttcaaagaaagtaaatttcactgaaacctgtgatcaaatattatttctataataacaactaagagtaagattttcctaaatgcctacatttcattgcattacctacataatggtatacgcttatacacaatgctatggaaacacgggtgaagcacatgatcataaaacagacaaggctgatttttatgtgtggtttgcagaaagcagccttgttactttataatcataccttgtcataatcactagcaggaccaccccaagaaatgccaaactgaatccattaaacctaaaattaaagagcctaacataatacttgtcctccttgatgataaccttgaaaagtttagattagccctattttcctttaataccctgtctggatcgatcatctaagaaattatcttaygattttctgtatctgtattttctaatgacacttgcattgtacttttacagcactgtcacacctattatctcaattattgctgggtttaaacagtttatagcttgccatctagcttaayggcacaatttaacattattatactttgaagcactattttgaattgaaagaaggttaacatatctataacactggtctaagtttaagagaattttaatgaggccttaaaaaatcacttttgtcccctttcttaagtagcacattttcatgtactgcttaaagttttatgagggcacagactatgacactgtgtcctccagtgtgcccatatcacacaggtgcccaaaaggcttgctcaagtaatgaaatgagcagtgataacaggtcaactttgggtgcagctgtgtggtataaagatcactagagctgactcggcctatcaggatgcctaggcaatctactgtgtaggtttatctttcgctgctggcctcttagatgttgaccaggcttcagccacagaccttcccttcacattctacacaccatctaagcagagtgctccactcccatagccttacctcctattatgtgtgtgggtaacacccaaatcattgtctttgactctgacttctttcctaagctacaaattatatctcttactattaactatttgcattcctatgtctgactaacctcaacacaacaagccccagactggatgtcatcatcatccccttaacccctgccccttgtgaggtgttgtcatgtcagtaaacagccccacccaattgcttaacagtaaaacccaggtaaacctcatttcctcttttacctacccacactgaatcaatcaccaactcctagtgactctaccaccaaaaatgtatcttcaatttatccacttctctccttacctattgagaccacatctcagccacacatcattataactcaccagaattactcctaactggtaaactttgtctccaatctactttctagccagaattatctttccaaaatgtgaatctgctttaaaatccttaaatggcttcctgccatctgtaggataatgccaaacctcttgtcatggcctacaggtccttaaagagctggaaactaccttgtaagttatcctatacgatggcaaaatgaatgaagtacacagtctagaggaaccagactgacttcttgctttccagctgtctcataataggcaaattacttgatttctttgtccctcagtgtcctcatctgtaaaatgggaatattaatactcatttcacagtgcagttgtgaatattaaatgagatagaatacaatgtttgatatagtatctgacatatttgacttataaatattagtcaatattagctacagttactatctacttaatttctcacttacctcccatttgtatttgagttctatccacagaaaacatctttcattctgacatatttgacacataaatattagtcaatattagctacagctactacctctgtacttaatttctcacttatctcccatctgtatttgagttccatccatagaaaacatctttcatttcctcttttcacatatttcctcttcctttacgtatccagttcctccgactgcagtctcctctcccttcaagccacccctcctacaattcagatctcctcctaagtgctacctcctttggaaagtccttctgcccatcctgtatgtgtttggtgcccttactttgtgctaaggtcttgtattttccttgccatggcacttgtcccactttctgtaaatttctctctcttcactgctaaattctaagttctgtgtgaagcgtaaccatgtctaccttgctcaccactgtatttccaatgcccagtaccagtgcctggcacacagtaggcttaataaagagtgtacatttcctctctcacagctccagatgtactcctccgcaaacttcagttagtacaaaagcacagtgttccaataacagctatctgtagaaggaggttcaaaaaggctgccacagaataaagaacctggtcaaataatactgggaagtgcaggtttaaacaaagttagggttctgaaccatagtaattctatagttcatagtaattctatagcaattcatagtattctattctaatagaatagaatcttttctattactaaagtgcgctgggaatttccaagttgggaggtggggtggagaagtgtgtatttctgaaaatgtctcctgcaatcagtgttctgcagtggcaaagctggtttgaggagatgctttccgctactagaacttccaagtaagctggtagttgaggacgagaaaatcttttaagtaattattctgcagagttcaccgtttttaggtcagtaacttctggacatagaatttgagagttagaagaaatcttatatataattcaacaaagctccttctttttataaggaaactgaggcccagaagcacaaagcgaccaatctatggccacggagcagctacatacaacaggaagagctaggagtagaacccgcacacccggtgggtcctagcgacttctaagacaaacgatgcctccggttacctgggtcggccaagtgttcccacttcaagttttagttttaagccataccacagttaaggtagtttttctcggccgcttgcccccttaggcctacagttacagtctctccctcctccctcccttccacaatacactttccctgtaatcccaagcagctggggcttggctcctggggggaagatagttattttctttccttcagagtttatgtttggagtgtaaactttttcatgtamacaaaacaaacctgtgaattttaaggcctccgcctaaatccccatgggcgctgctccgtacacgccgcaccctaccctaccctcccttgcgctcccttcggagctcggacgcagaggccctgtaattgctccttacctgggactgccatgacggtggtaagaggggtaactcgagcctctggctttcgaaaaggcgcttgcttcccgccagctgtgagaacaaggcacagtcaaagcggcgttttccttcccccagcgcagcagcaccctcgctacggtcgggaagggcctgtacgcctctagcgacggcagaaccagtagatgcggatgcagtttccggacgagtcatattgcagaagacacatggtccgaaccattactgatagttttggagggggagttagtttgatctgcacacgagagtagtgtaaacaccgccaacacttatgaagtgtcccttctaatattgtaatacaaataacataaataacattaagctatggtaactttacggacttttctcgttccctggagtacattggaataacccttctcagggttagcggtgctcgggtccggtaacaacatggcggcgtccgtgaggggctcctttgggcaggggtagtgtttggtgtccctgtcttgcgtgatattgacaaactgaagctttcctgcaccactggacttaaggaagagtgtactcgtaggcggacagcttyagtggccggccggccgctctcatcccccrtaaggagcagagtcctttgtactgaccaagatgagcaacatctacatccaggagcctcccacgaatgggaaggtgagagcctcatctagggaacttggggtcctgggatccccaaagtgagatttcccggatttggggtggggagtgggtttcaggatctcgtggtaggaagagaccacgagaagtgttgtctttactcctgcatgtggacaatgttgcatcgaaacactgatgttggtacttttcaggatgtacttgaagaagtcaagtggagatttctctacctaccagcattccggtcctatttaatgctttaacccaactcatgcagcckatttctggggtcttaggtttttaaacagacatttttgagtttgatatattctttgcttaactaaggtcattcattctccatttcttctacaatcattaattgaacgcctgcgaggcactgggcactgtactaggcgccggagatacaaagatggatgggtaaggtagttgttttcccggaaaagcttatagtttagtttgtgagacagacaggtaaacaaaagcctgtatgtctgataagcgtgcttgtggagaagagaccaggttgctatggcggtactgagtagtgaacaactggggaagttaggaaaagcctcatggaaaagatatcttttgagctggttttaaaacctgagatgactgtcagtcagagaaagtgggaaatggggactattaccacattagaatggggaaaggtttctctgattgatttgatggctaatgtatgccaattcccatccaagatgtttgtatgctgtacaaggcagaagagtctgttgtggaataagtgtcacctgaattcttaaattgagacctagcttatatcacatatgaaatttgatgaatcagcatattggagaaaatgagattggaagtatatagttgaattaagataagctaaatttacacaacataccatcctgtttgttacatgattgcatcataaataatttatacagtcttttattcattgacatttgataatgtaatgagagcaatttaaaagtgaaaccaaaaatgctgtaattcccagcaaaaatgtaatggatattttatgggcagaccaattctttcaattctttgtttgaacttctcctgggcattgtagattagtatgtccatcccacccctcacctatcttatttaatatcaatgtgaaaacccaaaatacctacctcctcctatttccaaatgtttcttgagggcaatatcacccccagttaataaacactggtagagattgaatagatttaccatcctgccagacagggccttcacacttgctgttcctctgtctaatcaagtgttgaccttagcaaagagccctttcttatctactttctatgaaatagcaaacttcaatcatgccttgcatcccagcagtctctggcccccttaacctttttagtttttttcatggtatttattaattatttagtattactgtatccttcctcctaccttccccctatagaatgtaaggaacataagggcagagacaagcatctggaacagtacttgatacatgatagaaggagttcagataggtattgaataaatgaatggatggatgaattaatactatatttttcttagtttttgagaagtattaagcatcagtgagtttgaggttatactgctggtcaaggacagacttaattgctttattctaaagcaagatttgacatggtcatatagatgaaaagctttaacaaggatacattcctgaatagattattcattcaacaaataatgattgagcaaatcaattgccaggctctatgctaggttttagggagacaatggaaagaaaacacagcattgactcagttgtcatgagttagttgagtgaagtatacattgactgaataatcatgcaaataaatgtttaattacaaaatgtgataaatactatcttctgaacagaaataggctgaatgataacataagggcccaagttttcatccaaaaacagcttgggactttttccagcataaggctcatcaaagatattaaagcttctaagttctgtaaggttaagagtgtggacaaaaatttggtctgtgragaatttgaagcamatgtaataagtctgttcaacgaatgtttattgcctttactatctaatggtacattaggtgctgaaagcgtacagagacattcagagtaaatgggacaaaattcctcccttcaaagaacttagtatcagcttgggaagtaattgatacatgataccagtgcttggtccctggttgtccataaatgttctgtgttttgctgtaaccctagcccctgaagatgaggcaaagaaatgtagtacttgayagaaagtttttaagcataagaggtaattccctgaagatgaaatttccacatattatgatcacttattctaaattgtgtctggcttcttcacttagtgtaatgttgctttcaaatgataggggtctgtcttcctgttgtacacacttagtttttaaatatcttgaaaatcaaaatggctttwtatttgcatatatgtttataagaaacatgatattatcaaggtattaattgggaattttaagagaaagagccaaggaggcctacaaagtagtgatgaccaaagagaatgtatggccagaggaggaaggagccatataccttctttattaattcagtagcttattaatgaaaagattaagaaaccctggtgagcaaagtggcccgattatatatgcattctttttactaggtgtaagttgcctgkggccaaaaaaccacgtaataatgactatcattttttgagcacttattatttgtcatttacttttctaagcagtctatgtattacagctcattttgtcctcacagaaatcctaaaagatattattatcccgtttttagattaggaaattaagtgacagagatgtcagatagtgtgcgcaaggtaacaaagctagtaaatggaagggccagtatttgaatttgggcatcctgattccagagcctgtggagggagggatgatgtaattagtgtgttcattagagcagtggtttctaaaccagtgagtgcatacttcagtgggtgtgcaaaaccatccatgagctgtggggagaaaatctatatatatttgtatttttttcctttgtttaaattcattatttaatatatataaaaagatgatgactgggtgcagtggctcatgcctataatcccagcactttgggagactatggcagattgcctgaggtcaggagttcaagaccaatctggccaacagggtgaaaccctgtctctactaaaaaaaatgcaaaaaaagtagccgggcatgatgttgtgagcctgtaatcccagctactcaggaggctaaggcaggggaattgcttgaaccaaggaagtggaggttgcagtgaactgagatcacaccactgcactcgggtctgggagacagtgagactcygtctcaaaaaaaaaaaaaaaaaaaaaaaaaaaaaaagtccaggcgcagtggctcatgcctgtaatcccagcactttgggaggctgaggcgggcggatcatgagatcaggagctcgagaccagcctggccaacatggtgaaaccccgtctctactaaagatacaaaaaattagctgggtgtggcggtgggtgcctgtagtcccagctactcgggaggctgaggcaggagaattgcttgaacccgggaagcagaggttgcagtgagcygagatcgtgccgttgcactccagcctgcgcaacggggtgagactctgtctcaaaaaaaaaaaaaggcacttttttggcattgtggtgtaatttttcataacgactagccaaatagatttatagaccatagtatttagattaactaaaccagccatcacaaatttcttattgaagatattattaataatataaacaagcaaatcataagaacatgatagagctgatacctcagcatgggaagtctgtcaaaaaaatcagaaattattatgaagaccattggaaatatggatttctatttattgttttcaatggtgaactttgccttaaatatatattgtgtcttgaaatatttaccagtaagagtataaagtcattgtgattttcaagacatttaaaaactagatgtgtagaactgaaagacccctatataatttgaaagcaacattatgctaagtaaaagaagccagacacaaaaggccacatattgtatgattctgtttatatgaaatgtttaataggcaaatctacacagacagaaagtagattagtggctgccagagagtaggagtaggggtaaatagggagtgactgctaatgagtacagggtttctttttagggtggtgaaatgtgacttagcattgatgatactgacctatgagaaacagcctcatgtttttgaacagttatattgcatactctttacttgaaagagcattctaaaagattgtgatggtcacaaattattgacactgatctactttggtatactaggggagaaaaaagaagaagtaatactggagaaattggtttccagctatgccacaatgttcaaatttagagcctaacattctttttggttatttgtggttataaataagacagttataaactgtttcctgtgggcccagcagggaggggttctagttgcaaagtttctggttctaccaaggagtatctgctgttatgagctggtggaaaggctatcacgggattctatttactatagaaggtgattttaagacatagtattttagtaaatcacaagccagaattagattaagaatgttcctttgtaaattaggaatagcatgatgttaaatgagcagagagagtaaaaggtaattaaaaagggtaattataaaattgtcctataatgtcacaatttaatgggttcattattctttaatttcttaatttgctacacagttttattggaattgatgcaatgggaaactcaattataacaaatttgcattattggggttttgtcatgttttattttattttgagacagggtcttgctctgtcatccaggctggaatatagtggcatgatcatagctcactattacttcagattcccaggctcaagtgatcctctcaactcggcctcccaaatagcatggaacaccaccatgcctggctaattaaaacaaattttcttagagacagggtctgtctgtgttgccgaagctgttcttgaactcctagcctcaagtgaactcactttagatattaccgttttctaaatgaatgaagtttttttctgtgattaaaaaagatatatgctattgttttcttaaatcccaaactttttctgaaatggtattttgaaagatctaaatgtacaatgagttgtagtgaatatttgacattttgttgagtatatcaacaaaagccaaacacaatttttaatatttcttttaaaattgaaaactcactagtgattgctacaagtcaaatagttattcaactgattattaagcaaaataataatttaataaaatgtaatattctttctacaggttttattgaaaactacagctggagatattgacatagagttgtggtccaaagaagctcctaaagcttgcagaaattttatccaactttgtttggaaggtatgttgacttttattctactggagaaattcttgttaatttaaaaataaactgcagtgtctgcttcacaacattgaagactagtgttaaatagtggtcatgaatgacaggtgttgctatgaggatatggtattgagctgggtgtccggaagtagagataagagataaatgttatcccaaataaatttgaatactttcaacagagcagtttatctcaacaaataatactgtgatcctctttggtcttctttgctatcttacgcttcttyctttcattctctaaatttgggtattccctaagattgcctctagttctctattgtcatcactctctagttgttacttcartccaaatgactaccacattaagaacttcagtcatttcttctcttcctagtactaatttacatatctaattgcctagtggacttttcaactggagccttccactgttagctataacaaaaccagtgtaaaaccaaatttaccaatttcttccccagtctgcctttcacctgtatgactgtaattgcctcttgcctgctccccttcctgtctttcatccttaatttcttttctctcttccttgtttatatggtatttgaatcctcaggcagcttggcttcctagctatccaactttctagctcattgcactaaccacatggttttagttggacattatttcctaagcatttcctttccgtttccactttcatacatgtcctcatactagttccccttcttttggtatgctttttcttccctttttttactgtttaagtctacccatttttaaatgtctgttcaaaattctagtttctccacacagccttccagctagcatccagtgatattattatcaatgtctctagtttttttagatttgagtcataaagtaactatttttctttttttaaaatgctgcagaattatacatccactgaagtgtttttccctgcagagtattctcttagggaagtaaaccttccatttttagagctttttgttggcttctagaatacattacatatggtttggaatatctccagcggtggcaaatcattgttcttctaagttatatttgatttttagagacagttttattcaaggtatcagaaaacaacattttgggtcagaagcaaggtgtgaaagagaatccagtagtatggtatgatgagatctctctaaatagacgtaattatcaggtgaagatttaagaaatgaaaaatacccagataccaccccctctccaaaagagagaggtggggaggagtggagcgagagagagagagagagagagagagagagagagagagagagagagagagagagaatgaaaggacatctgcagagaccattattaataattgctgtggcaggcaagaaagaaatagagtcaggtaggtagttcagtcagagaggcctcatatatctgttaaccaagttgagacacacaggagacatgaaaaagtcacacttgtttctggtaagaagttttgaagattcaaaagctcaagttttacagagggagagtgaaattacaaaaacattagaaagaatgaatggtaaattgcaatccatgaccaggtgaatggaagaagcagaaaacatctggatacaatgtgacagtgaagaagaaatgaggttcttaagttgggtgatgataaaactcaattattacaacaattattcccctatttataataatgcaaggagaaagaagaaagaatagaaaaataattttaaaaataaccacaacaattatcttaatcaaattcaccaatcctcttaattgaatagagatagaattattattggaaaggctaacatgaagcctaagaagactgatttaaacaaggatactcctaaataagttaagtcaaggtttcaaaaatataatccagaaaaccccattttagttctttgcttctatgatttagacgagtcataatgtttctagatcttgaaacactcatatttatttttttaaagcatggtttccagaatttaaaagcaaatgaataaaacatgaacaagtaagagcgcagtctcagatatggccctcaactaaaatgatgttcatagccaaaggatggtttatagcctttaaaaaaccaaaggatctacattatacagacttaatcttagatttttggtctttgcagcatagttaggtggacatttaaaatgagtggaacttttaaaaacttatcaattaaaaaatagagcaaaaaagatataaaggaatgaaagggaagcttattagctttgataatttcattagttcctccagtgtgaggaaggagtataattttatgtttgttttatagacaagtggggagcagagggagaagtggataagaaaatcaaaatgtttaatacattgtgtgactactaatctcttcacctttatttcacatcattcttgtctcatcatggtccacacttcattgcttatcttttattctttaataatagtttactaattctttagagtgacaaatataagcataaatatgctataagttaaaagaaatttctttacaaaactaaaatatttgtttaaaaaaataccagatagtgcagactggtcgcaagatgagtgttagataaaaagttattaatgataacatttacatagttaaacacaaaacaggattctagaagaagaaacgtataactactttaaagtgcaagtataaattcctctatgaacttgggcaagaaatataattagtcaaaatatatgataatgcccatagattattgtagccagaaatagaaaccatgtgacaaatactagaatgacagcaatcaaataggaactttgtttcatatttaagatacatttaggtatcttttttcaatagtggagaacattcaggaggatattatgaacgtgcataatgaaataataaagctttttcaaaacacttgtgatgatgcataaaaatttaagaaaatcaaataaacattgcaagcagcaaaatatacagtattataaactataaatacaactataaatgcatagttcaatagtgattactaataaattacaaagaagtagaaatagtagatatggaagatttgtggacattggaaattccagctatgttagaatacaaagttatagtgtagagagtatagaaaatttttactcatttatatatagtataataatttcatgcattcaacaggaatataactaggaaaatcataaagaaaatcttaaaataaaaagccagcatcactgaaatacttaatgggaaataggaaaaagaaagaaartggtgaaattctaaaatttgaaaacacaagtaataaagacctctttcatgtcctttttccgtcacaggtaacatatatctgggttttatggatcttgcttcataagtagttcttgaatctgtgtatctcaagataagccatagttatgtaatgactctcaggatagtagttgcttgcttgcattctctcactggctctctgtcgcatgcacttgcgctgtctcttgctttctttctctctctctctctcactccccctctctctccagtcatgtctctttctaatatattcacactgggtaagagtgacattttgaaaatgcaaatctgatcatgtgcacagtgctcaaaaagtattggttggctgcttattatgggtctagatgaatattcattatatgatatatactggggtatattttatattcaaatttgaatatgaatttgtagcatttgagtgaagatattagtttgacctcacatttgtgttgaacttgaaaatgtgtagtttgctttcatattatttaatcttcagattgacactgtgccttaatttatgttattagatttatgagaaaatggagtttaagactgtatagctagcaaaaggcaagactcaaactcctgactgctacatacagtgttagtgtaactgatgaaatggttacctaggaatataggagagatactttaagaccttttggtttttatagtatctatttgtaaccagagggaatttgtctgcactagggagctcttgtaaatgcagcccaactgccctgcaatgggagaagggactaagcaaaaatcagctggtcttcctttctacttcttatgtactgtgtactaaatacagttgttagaatacagattataatttttaaaatatgcattgtatatccagttatactttgcaaatataaataattatgagggtgtctccaagacactaaaataggaactttataaattatgtcagtaactgtatcagtaaaatgcctggcccacagtagatacttgataaatatttttcattgaatgagttatattcaggttgtattcagttgcaggtaatagaagacccaactcaaaatgatttaaataataaagacatttatcctcctgtatgtcaagaaatctggtgaaatctttagggaagctcagtgaaatctttagggaactgtgctttttccatctttctgctttgtaaccctcagcatgtgattgawtcatgactgcctaactcgatgattggctcaaccacaacctgctttgttgctatttgctttttgtttgtttttacaacaacaaaaataatagcttttgtttattcastacttcatactacatatgttttcctcttgtgcttacctaatgtaagtacagaactaatttcagtgatgtaaaatttctttccttccacctaacggattttttgaaaaaactgtggtgaagtttatataaaatagaactaaccattttaaagtgtacagttcaacatcatttagtatattcactataatgtgcagccggcacctctatgtagttctaaaacactttattaccccaaaagaaaactctgtatccattaacccagtcattctctattctccccttgatatggtttggctctgtgtccccacccaaatctcaccttgaattgtaaaccccataatccccacatgtctagggcaggaccaggtggaagtgattggatcataggggcattttctcccttactgttcttgtgataatgagtgagtctcatgagatctgatggttttataagcatctggcatttcccctgcttgcgctcactccatcctgctgcctgaagaaagtgcctgcttctcctttgccatccgccatgattgtaagtttcctgaggcctccccagcaatgtgggactgtcaattaaacctctttcctttatgaattatccagtcttgggtatttcttcatagcagtgtgagaatggactaatatacccctcctccacccacagcccccagcaaccaccaatctattttccatctctgcagatttacctattctagatatttcttataaatggagtcagacaatatgtgactttgtgtttgggttctttcacttagcatgtttttgaagttcatccattttgtagcatgtatgagtatttcattcctttttgtgacagtcatattccatcatatgtatatatcacattttatttatccattcatccattgatagacatttgaattgtttacacctgttggctcttgtgaatagtgctgctatgaacatttgtgtrtatttgagtacttgttttcaactcttttggatgtatatacaaatatatatattttggatatatatataaacaatcgattcttttggatatatatagaaacaatatatataaatatatgatgttttgtaaaagcaaatctgatcatgtgcacagtgatatatatattatatataatttatatatcaaacaatatatatcaaaattacttataactataattacttatatattatatattatttatgtgaactatatatatttacacttataaattatatattaatatataaacatatatatcacttgtatacacacgygcacacgcgcgcacacacacacacacacacaccggaatcataattgctggattacatgctaattctgtgtttaactttttacactattttatattcccaccagcaatgtaaaagggttccagtttcatcacatccttaccaacacttattcttttaaggtttttgatgttagccattctagtgggtgtgaagtagtatctgattgtggttttgatttgcatttctctaatgactaataatattgagcatcttttgttatgcatgttggtcattattgctacttcttaatgtaaaktctcttattcaggcaaattctaattcctgcttcccactcaatttgtcgcttatactttgcctcactgagatgccatgcttctgccattcccaagttaacttccttttcttctatgaagtatcctaatgattttaggttccagataatatatagtataggaggtcatatacagtctctcctgtatatttatragttctaaattatatactccaattgtatatttttgaattacatataaatattaataatttatttcaatcatttagcaaactgagctaattggactcaagtatgtattgtgttatttgttttatttattcaaagtttcttgaggagggtgtattgatggttctagacctataactaataagtaattttgatatattatgagtttgtgtgttaataaattaatttcctgtgaggaaaagaggaagcagtgggaaataaggtatttatctttgccagggtttctcagtctccatacagttgacattttgggctggtaattctctgttgtgggaactgtcttttgcagtatagggtgtttagcagtatccctgccccctactcactggatgccagtagtatcccccatttgtgataaccaaaaatattttcagaaattgacaaatgtcccctggggcacaatattgcttctcctccctatcagaactctctaatttctgttttgaagaccagtccagagtttgagagaatcctagaaataaaaacaagaagtcaacagtgatggtttctgtagaaatgtgtgctgttytgagaagtaactattttataagaaggaggatacaaaaggttttggctggggagcgtatttaacrttctggaaaataaatcttttgactctagctgtattaattttggtaactgtagagatgattaattttagacattgataaattatttttatttttttttcagcttattatgacaataccatttttcatagagttgtgcctggtttcatagtccaaggcggagatcctactggcacagggagtggtggagagtctatctatggagcgccattcaaagtaagactgaattattatttttattattatttttgttgttattattatttccaagtcagtttggattgcttaatcgaaaatgattgtgttccacaagaggaaaaarcgtttcacattagtatataaacatcaggctgggtgcagtagctcatgcctgtaattccagcactttgggaagccgaggggggcggatcacttgaggtcgggagtttgagaccagcctggccaacatggtgaaacctcatctctactaaaattacaaaaattarccaggcatggtggcacacgcctgtattcccagctactcaggaggctgaggcaggagaattgcctgaacctgggaggtggaggttgcagtgagcggagatcgcaccaatgcactccagcctgggcgacagagcgagactccgtctcaaataaataaataaataaataaataaataaataaataaataaataaataaattgtctgtaaaagatgcattaatcaagaacaggtcagtgatttcttaactgccaacatagatctaagaagaaaaggagttartgtcwgtgaagataataacaacagcaggttcaagtaaaagctaaaagttgtgtttgttattaatttgatggcaccaatatcatgttctttgaatgagtaaatattggtatctcttaaaatatgggagtttttgaaaaattcgtttttatattaagggaatagattgcattttcctttcatcttttaatgagtcattgtgtgattcttgaagaaaatacttgaactgttagctttaatttccagatgataatggccttagaaatgtggaatagttattttaaaagtctcagatgtcacttttagactattttatattttaccatggtaagacttctcatgattttagatactccgtctagtcggaagcattcttttattcttttatttggtgtgacagaatagctgtttttgacaattccttcctaatttgagatttttgcttcattattttcaggtaatacagttatcttgttacatttttcaattaggtcattttgaatacagtatacagagttatgatccattgagttcagatctcttgagaattatttattaaggaaaaatatcttcctttgtgaaaagcatttatgatataacgtgactacatttataaatgagttcwgtatcaggctggatggaaattctgttaactaagagactaatatatttgttaagtagccctgtcatggtgagaaaaccaccttagaaaggcttgttcctgctcttttgaaaactggcaaatagaatcagtgccatttcagagaagattcaacttaggactttaaaaagacatggtaaaattacataacacaatcatagtagattatttgaattaaaaaacaagaacaaagcaattgtttaatgacatttagaatgagatgggaaggagtaataattgaatactctgcaatggctcaaaggtagttttctgggagaaataatagaagatttcaaaagcatagctgactttgggatgagaatagggaaatgacttagaaatccattcccccttgggtactcttcctttaggtgtaactaagcagctttctacaaaatagggtatatttctgtctgagtatatttagaagatacagtctagtgaattcaagtttaataacattgaaagaatagtaaatacttgaaaatcaattaagtaaaatgtctgcattttttattagaagttgtatgggaccttgcaggtcaagttgaataactgcatatgaagggtcttataactgaggacattcactaaatctttttacatttcaggatgaatttcattcacggttgcgttttaatcggagaggactggttgccatggcaaatgctggttctcatgataatggcagccagtttttcttcacactgggtcgagcagatgaacttaacaataagcataccatctttggaaaggttagtgtccagtgattttaaacctgtggttcagtttttggttttatgttattccttagacttctaagatacatatgattaacttatctaagagctacctttgtaaaaacwttccataggatatgtttattrttttcaaaaatgatggaatatattcctaatatagtgcactatgagggagcatctaagttctttttggatctttcaattcagtcattagttgtgactttagtgtattccttctttaaaatcatagtaatggtatgagctaaaatgtgccacttagccaatattgattttacacttttggaaggacatttaggtaataatatttagtagtttacagtttattttcttaatgatggattttcttaagtttaaagtggaatttgtgttgacattgaaacttcttactgtaaatattactttgaatagtacctatttaatcctgctcacatttaatgtcatattagggaacgtcctttctatagaatttttaacaattccctttaaaaagggattctgaaggttttcttctctcactcttctccattctcataaatatgtttctatatgttttaagtcttaggcatatcggacatcactagtgcatcagcgccctctgctggttcagtaagaatggtttccccatatactgggcaaaactggatttttgtggtgatgaaagggaaaaaaacaaattcagtacaattggaaagctggtgttgttttaaaactcttgaaaaacactgaatgaaaggaatcacactaaaacyatatgttgcaatgttgttggttaatacttattaataacagtgggttaggaaatatgcattggcacattcttttgagccactccagcacagcctgtctgatgtttatagattccctccatttattccttaaaaataagagtgtgtaataaaatgagatttaagttgccattctgcatcagtttttacaattgggttatataactaacacatcagagacaatgtgtagcatagttagaagttagaaaggccatcactgttggttttataccttctttgatcctcatttttcttatctgtagaaggataatattagttcctacttttaggttgtttgtgaggattaaatgagataatgtctctaaagcatttaccacattgttattgttatttgcttattttatcctattccaaagtttaaatttgtttatgatgtttgaatgaaaagttgtcattcagtaggagattatttggcattatattattaataaaaacttacattaaatatatattggaaatttccaaaaaacttattgggggattgaactccatccatgcttttctcctttaagataaagttgctttatttgcattattaaatgcatatatttttatgtaatcacatgaaattttcttttaattatttgaaagatgttttcaaaggttttctcttaattcaaaggatgagtgcaataattttcaattacattatatttttaatttgataggttacaggggatacagtatataacatgttgcgactgtcagaagtagacattgatgatgacgaaagaccacataatccacacaaaataaaaagctgtgaggtaggagcatgattattacgagatacagcacttacattgtcgtttaagaggaattgattcttagtatttttaaactattggattaaggctttatactatgttaacatcacaactcaaattttatctctaatttatttgggcaccgtttctagttaagaatttttttaattaaagattttaattcaaagatgaaactttatctgataatccaatgactgwaaagcttacctcataatggaaagttaaaggaattaggtttatttagcccaaagtagtgacttcataggtaatttaagagtaatctgctgggcacggtggctcacacctgtaatctcagcactttgggatgctgaggtgggtggatcatgaggtcaggagatggagaccatcctgactaacacagtgaaaccctgtgtctactaaaaatacaaaaaaaatagctgggcatggtggcatacgcctgtagtcccagctactcaggaggctgaggcaggataatcacttgaacctgggaggcagaggttgcagtgagccaagatcacgccactgcactccagcctgggcgacagagcaagactccatctcaaaaaaaaaaaaaaaaaaaaagaatgacccttcattgaggaagcaagaatacttgatttggaatcaaagcatctgagttgatcttgtttactgtgtatcatttacattttcttaaatatttttcccttttgtaaaatggggataaaatatcccttacttaatagcacataggattattgagagaatccagtgaggccgtgtaagtggaagcatgttgtgtagtaaatatatatcactatactaataatgtttatgtggggaaaaatatagacactataccactggaattacatacggggtttgattttttgtgaaatgttaaaaatggaataatgttttcgaaatattttttttcataggttttgtttaatccttttgatgacatcattccaagggaaattaaaaggctgaaaaaagagaaaccagaggaggaagtaaagaaattgaaacccaaaggcacaaagtaatcatagtggagagatttttcttcagcttgaaaaatgacactcattcatttagtttactatatttccttttatagtaattgtttactagcaaaggagaggccagtttgaaccagagagatattggaattatgagtgtgtggttgtattagttcatttttacactgctataaagacatgcctgagactgagagatattggaattatgagtgtgtggttgtattagtccgttttcacactgctataaagatatacctgagacagggtaattcataaaggaaacaggtttaattgactcacaatttcacatggctagggaggcctcaggaarcttcaatcgtggaggaaggcgaagcagtcaccttcttcacaaggcagcaggggagagagcgagtgggaaggaggaactgtcaaacacttataaaaccatcagatcttatgagaactcactcagtatcatgagaacagctttggggacaccaccctataatccagtcacctcccactagggtccctcccataaaacacatggggattgtgggaattactcgagatgagatttgggtggggacacagagccaaaccatattagtggttttgtttgtttgtttgtttgtttgttttcctaaatgagcaactcttgtattcaggtgcagtatatcttaaacttaagctacaaacatgtcatctcagttgttcacatgaaatctgtgttaataaatagatacatattttatgatccctgtaacaattatttatataaatgagttgttgagaaacttgtttgttgcttattttaaaattaatatgtgctcactcagtataaatagaaagtaaagtataaagaatatttttaatgactgcatgattgcattatgcaatttaacttgtatttaactttttactccttttatgttgctattaaaaataatattattataaatattttaaaatataaagctgtttcattcagtattctggtttatttccagaagataattttccaaaaaataggaatgaaaaaataaatttcagtattttggacaatattctacattattaatactgtctgtatatactgcagagttagatttcaacgtactcttttactgaatcgtaggatccttattagagattttattgtaagtataattgttagatttgatcaattctagatataatcctgccaaacctagttaataaaaggcaaagttgattaaactttctaagcttcagttacctcttcctataaaatggagattagaataagttcaactcctggttgttatgaggattaaatgagaagaggtatgttaaaacacccagtagtataggcattcaatacctattagtctttttccttgatatcctacaaatacaaagttaaattgttttataaagtgtcagatatgagccagacactttaataagcagttaattccttgtggcaaaataactgcttattggaattatttatttgatttttaaaaattctttgatcagcttattttgattaatctatctctggatgaaaggtcactgtcactgtattcatatgcagtgcgtcatcactatgatttatcttaacaataaactctaaagtctttttttggtgtgttttgctttgtttttgtttccagcaaatatattggggatgatatgttggtcgttgcttgcttctaggctttgggaaaaaaaaaaatctgtttcactgccacatctttaatttttctatttgagagacagttttagtaacttgtttatcttacttgagattacttttgtttgatgaatcagaggagacaaacctagttttttctccttgtgggctattttagttgttcattgctcatatttttttgtctgacaattttgtatacatattaattttaaaatattaaaaaatattttgccaaatactagattaattgcttcccatttgtagcactcagggatatatacttattatttttcagaaacccccattttgctaccagttttgataaatataaaaaagcttaattatttctgtcatgcttkactcagtamatttaatggtaatgctcagragggatttttggtcattaaaagttagtataatataggaaacattggtgctgtgaggcaaaagctttaacatcatactgaaaatacagatcgttagaatacttctgctgaatactgagtaatatggtcttttttagaacagtcagaatgtatttcttcttgtaaattctgttctcttgctctgaaaataaggtatttataagtttgatttgactttctctttctttttttttttctttcttttttttggactagaaattttagtttactttcatttggagaggaagctgaggaagaagaggaggaagtaaatcgagttagtcaggtaatctctaatttgccctttgttctaacttacaaaagagattggggtctatatcttactcactattgtatctcctgctatatctggcacagcatgttttacatggggcaggctcagtaagtgttcattgaatttgtaaattgatttgtggtcagtaatatttgcaacttttgagattatcctatttatttttaatgttggcattttaaaaaaatcagtttgaactagacttgcagttttttgaatggttggactttatgattcagatcctaactgctattttttcaggtagtatgttagatgataatgattattatcattactgatataaacagtcacagaccaaaactcttatattcattttaatgttatttatatatattttgtttatttcattaattctcattacagccctttgagatgggtgatattattatcatcctcattttactcatgaatacattcagctatagtttataatttgctcaaagtaacataaccaataagtagctacagatgggaactgaacgcaggtctttgtaactattaaatccatgtccttgaattatgcagtgcctcctggcctttttattctgctagtccttcctgtaggcctttacatgtggttttcttcaatattgcttgcatcataatacgcattactgaaacacggtgtcatgccattgtttagagcagtaattctggtgtgtatactacaagaaaactgtcttcaagggtttctactcctaaaggttctgatatgcctttcttttttgaaaattagtgaatactgagaactaaaggattaggtttatagtctttattgttgtaattaaaactttataacctataagccttacttgcttaacataattatctatttcttaccaactctaacaataacattgaattaaaagcatattattattattcttgtttttacttctttagccatatgttcccttattagtgagcacggttttgcaggctaatgttggacgcctagtaagcactctacttaataccccttgcattaaaatgtaattaaaatggtgtgtatatgaaatattttggtcataactttttgttgctttttattgtatccttgagtgatgtatttgatgccatggattcaatttccatttacctgtacaccaacattctaaactctaggagataaggccaaatatttctcctgggctcttatcccttgttcagagttgctttaggaaaggtctctagatgtcaaaactaaattcatttttttacaaaaacttcatttcccaattccttaacgtcaccaatcactctgtcacctcaatatctgaagagtcatcttctttagatgtcagtgcactagtcttgcattgtttatgattcaaatttatgcctcatcaaaatgatttactatgtgtcatgattctgtggttatgtttgtgaatggacaaaaccaygaatrttagatctagaaattgccagggttccttttcattgatgttttctaaagatgtcaagtttccttgcatacccatactttcctcacagttcccccacccctgtttttccttttgccaggagtatgctctctccttaaagtgtttttcctttaagatttaggtctactatcaccttctactacttctacctccccctgccactgaactcccatccaggctaagctaggtacttctttccatgataatctgtctatgcccatcaaaacatttatcctactgcattacaataatttatcttcttatctgctaactatactatttattttatgtaatccctataacaaccatgcaatatagatattatttttcttattttgtagaataaagaaagtgaaactcagagagggttaaataactcatccatgatcatgcaattaagaggtggtagaatcagaattttgaactgagggtttttttagctagttaagtctctcatatgattatgaatgctgtagaagctgtctccttcaagcccaagacgtctcaaaggttggtgagaaatttcactggtagcgtagcattctggggtagaaggcagctggggaaggcagttggcccgttgtccttccctaaatcccacagggtcctggatagttaggttgagcagccttggagagcaagggcaggagaaagtttttctgtcagttttttgttgaagttaaatttctagtctaaagtaagttttgttcacaattgctttgagatagacttgactaggaaattagtttgaattttttctatttgtaacagcagcatgtgttaaatgttcaaagattatcttccttctgctgctttctactgtacaaaatagaaaaatggtatgtttacattatactgaatattgtgaacttatactccaaaagcaatttgcgtttcagattgaaatgtacaaggatagcagcacagatagtgctgtctttttttttttctttcttaaacctgaaaaacactttaaatacttttagaaggactgagtaaaatcttttctctctgccaagaaaattacaacccaaataccgttcattatcaaatgaatattattatcctagtattgtgtcatcatagttttctcatctggctctttcgtagggggtgctttgtaattaagttatcatcaaatgcttgtatctgactctcacgtctatatctctaggctggtttactcttcttttctccagctgcttattggacattagtttatcaagccctggggaagtcttaactcactatctttttcttctcaaacttcttattttgtgactttgtattccctagtgtcaatatcttccaaagaaggtctttagattccattgtgatttttcatatattttttcattgcactgtcctggcaattttttatccaagatgtatctcaaatctgttttttccttttaatttattgttgctactacccttgttcagccttcattatctctagactggactgrtgtggtagtctatagaccagtttcccatctcccctctcttcttttccttccactaccagagcagccttcctgaagcttaaaatgttatttttactgtctctttactatagaaataaggccaaatttcttgtcctattatttcaagattctgctttcatgactgtccttcaccaactctgctctttcgactagtacttgttaaactttcctggtgataaaaatcacttgacatattttttaaaaattaagaatcctaggccttatctgagacccactaaattagaatttccaagcgaggggcctgggaagctgtacttttaatgaattccagaggaattcataccaaggaaatgtaggaaacactgctttagcagatmtgaatgatttgctgctctatatgtatgccttattgtttccattttttgtgcctttcttgatgttctttttcccacctgaaatgtcccatcacacctctggatatccaagtcatatttgttttcaacacctgaaatgccatcttttctaaatgtcttttccagcttttaaaaatcttytttttcttacccaacctttgcctttcttgtaatactgtacatttgccttttaaacacatcttttttgctttattacagaagaagcatatgactgtgtttgcattgtacactagtccaaagtccaacattataccctttactttataacttattaattgtgtagagtcctgggctgtgagcttgttgtacatagagtctgtgtcatctttgagtggcagtgtgctagaatagaaataacatggatttgggatcatacaaattcatattaaaactttaatttcccctgacaccctgtgagctttgataacttagtctctctgagcctcaattttcctttctgaacaagaaaatagtatgtcccacttactgttgtgagtaaggatatagttttaattttgatttattatacaatactgaaaaatgtctttgaaagccaagtgccttaaaatatactatacrttataactggtattttaatctcagataactaaagaatgtaaaatttctttaatatgatcataaccattatgtagaatcttatgcccttatgcccaatctagagggctggtgagaaatttcattatcagctcagcctttttgggtaggaagccacaatcttgacacaattggcctagtggccttcatgagcactcccattgagtcctagatagtggcttgtgcagcccagcctcattattacccaccaacaacccattcttcacatgcgattggatcttggcacactgcagaatcaaaaaagttaaaatctacagaatttaacttttttgtctgctttatgtaatggacaagtaggtaagtttagttggagaaaatagagtaacaagaacaatactgttgaaatttactggcttagagaaagggaaattgtttttaagtacatgagataaattctggagagaatccaagtagaagtgtatttttgtttattttgcttatatacagttttttacactaccagcactgttcaaataccttggtaagaagagggaagactagcttgaatgttggaaaactgtggctaatagaatatatttcttcaaaatttagctttactatttttaagtgtatgaaatgactggagccaaagccaaataagtgtctgttctaatgactaagaataatttgcagtttcagtggttgcatgaaattaaatatttctaaagggcttaaaaataattgtttcattcttcatttgtttatcaagtttcttttttcastgactgcacagtattaatctttattccagaacctttctgcccgatcacaagttaataattggtaaagtctgaattgaggctttactttatgtgaaaggagaaataagattagagtcctctctggtttatggattatcagtgtgggattacagacaccccttcaccccactcacttattcatgacaaggtgcctctcccacatgggttagctttccttcattatttatttcagtatctttctactacctgataaaatctcttagaatcatagaattttatagctcaaagggattttgtccaacttcttttctttatagatgaggaaactgagcctctggttaagtgacttgccagactgacttcatttcctttttgataggattgcatgatagggagatgccataataatcgtatcttgagttcagaaaagcaaattgtgagactctctcatgatattcttgtagacaacaagaagaaatgtgatctgggagatagtacagtcagatagatttatagctaattgaatacttctgaccaaagggtgctttgttgtcaactcatgccaatttgaactagtaatttgaaatgtaataggagtacatgtaaattctgtacttgagttcaataaaatcagctgaataggtatgacataatagcctgtgagtcctagttgaattactaagaataagatctctggaataaggattttaacatcctctgcattgtttagatcatacttgcagcattttatccagttgtgaacgtacttaaggaagatcttgacaaactagatgcatccagaggaagggaaatggtggggaagacgggaatgatgccaaaaaccacctaacatagggaatgcaatgaggaactggatataataatactttagagaaataaaactaagtgaaaatatgatcctagacttcaaatatttgaaatatttttatctggaatattgctcccttcatattgctttcttaaacaatgcttttatttgaatgtctgtattggtttaaaatttattcaggaatctttacatgtaactgaaatataaatgtcaggaaatatttttcaagttaaagcttacaatcaagataactagtttttatgaggtaagttaaacaacaggcccattttaaaagtatctcaatagctagatttttattcagtgatcaaattgtgccacattcacagtgatacacagagcatttctttcctacaagacgtagtaacatttttacttcaaatccagagttatagaagggctttttcctcactcagaaaaagttatcttggtagaccgtttcgccacttttgagactaaagtaaggatgttttgtcctattctagtttattttatgaaattaaactttcccaaaaaagttgggaggcggccatggcatggagaatgctgctaggctgtttgcaaagaggaggtcagaaatgttaaacagtgtaatttgtaaaatgtttctgccttatcaaattgtattcaactttaatttgcttatctttctagttgtttagacttagctaattttacaaaggtgttaacatattttattaatttcgtattactgttttaacaaattgccataaacttagtggcattaagccactttaagcaaaacaaatttagtgtcttatatttctggaggtcagaagtctgcaataggtttcactgggctaaatatcaaggcatttgcagggacttctttctggagtctctggggagaatctattcccttgcctttttcaacctctagagactgcctgtattctttggtgtgccccttcttctatcttcaaagccagcaataactggtgaagtctttcccatgctgcattactctaaaattgactctattgcttccctctttcacttgtaaggactcttgtaattacatttggacccatcttgataatccaggataatgtccccacctcaaaatctttcatttatatgcaaagtctcttttgccatgtaaggtgatatgttcataggttctgagggattaggacatggacatcttagggggccattattctgtctaatgaatgtctaaactaactttatatagtatgcctaacaacaggccttctttgtagttctagaaggtagaagtagggttggttggatggttggaaaatatacatagattttttttctctccaatcagagaatttcctaataatagaagccatttaaaaagaaattgtgcgtgtgtgtgtgtgtgtgtgtgtgtgtgtgtgtgtgtgtgtattaataagctcatttgaggtgttgagacatggttgaccagtcagcagtgatgtcaaggagatttcctgcattgcctgggagaatagattgtggcctctaaaatatcttttttaactaataagtttttctggttctgtgctgaaggtctcttagtgtattagttagggttctacagagaaacagaagcagccaataggatgtgagagagaaagaataaaatagatccatttatctattaatctgtcactttatctctttatttataggaattggctcttgcaattgtgggagctggcaattccaaaatatgtagagtaggccagcatgctggagactcagggaatagttgataaattcaaaatacacaggctggaaactcaggcagggtttctttgtgacagtcttgaggcagaattgtttcttccttgggaaacctcagtttttgctcttaaggccttcaactgattagatggggcccacccacattatggagtgtaatctgctttctcaaagcctactaatttaaatactaatcatatctaaaaaaatattttcatagcaacatctagactggtgtttgactaaacatttgggtaccattgcctagccaagttgactcataaaattatccacacagagttagagattgagccccagaccttccagtttcttggtcaatgttgctcctgtgtcccttcctcctccctccctccctccctccctccctccttttccttcttccttccttccttcttccctccctccctccctccttttccttcttccttccttccttcttccctccctccctcccttctttcctccttccttccttctttcctctctttctgactccctcccttccttcctttcttctctttctctccctgtctcccccgtcacttcccccaccccttctcctctctccctctgcccccttctacctgtattctatttagtccctactgttttgctgcctctttgttcttggatatgaagttccagataacataatttttctgtgtccctctgattttcatttttacatttgtttgcagatagttttgaattttctgtgaagcccctaacactgaattcactaaatatatttagtatttcattcatcagctaaaccttttaattagtcaacttattttaagcaatttttaaaacatttaaaaatatatttggtgtttgttcttcctttaaattcactgttacttgacggtataaataagaaccttaaagtaggtcattaagaaagaataggcattaaagggaaaaatgtctgaattcattttcactctcttaaggattgtctcctaatttcttcagttcatctccaatttgctttctctccctgcaggattcagagtctactgtagtgggaagagaggcctaacaatttggcttttcatatatttctatactaatttaattttaaaagttagttaaaatttgaaatggtaatgattattaaaattaaacacaggttcctcctattgtcaagtcttattttaaattagtgtaaaacaaggtttttctttttccttccagctatttaaagtaagttttggaagataaacaagaacctttttaaaaaaattaattactttttaaattagctaaatggagctaattaacatatgaattacctcacatgcttatcatttcttgtgaggagaaaacttaaaatcgctcttagtggttttcaagaatacaatacaagaacccattttaaaaatatattaacaatgaaattaacaattgtaaactaacattcacaaggaagtgaaatagtatagctcattaatggaccaagagcttacttagagatctgaattctaatcttgcttttgctatttattagtgtaagtcattttctgatcagtggaccaaaaggctagaacagaggatctggggccaattctgactgtgatgtttatgattgtgactttataagggaaccaggtggggagaattaatataggactatttctgaaggtagatgaaaataatctgacggccagagatgcaggaggaaggaattttaaggaaggaaagcatgaacaaaagatgttcaggcttttattcttgtttaagttatttgatgttcactgtacacttttgcagataatctcatttaattctcttatgtgaaataggcaaggctgctatgatgattattcccattttgtaggcaatgtttctgaggtctcatgagatcactgtgtttcaacaaatggtacatgttttagactaaaccccatggaattgtggaatactacattttgaaactcatttggtccaaccaccatctttcttcttgtcctgtcttctttctactataccaccttctgttttgtgaatattttcccccgtttttcatagtcagacaaacattatccagtaattagatgacattttgctttttcatcactccttagtttaagtaagtttatgaaattagatatatagattaattgcataattcagattctatgactttttaaaactacaaataatagcatatttagattaactgttggagaaaattttgtattatgaaattgcactataagcatgttttaattgattaactctatagagagctccatattaatacagaaattaaaatctatttaagagcctgtttttcaaattaaaagtggtgaagggagcttaaggaaaagaagtgttttcatctctctgtgtctgtgtctgtttaaatgtcatttaaacattttagttaacatactttgtaataaattttcccacataaaattttcttcaaaatttttcaaagcagaaattattctttctgtcaactctaatctcttaactattcatttttatatgattagttgggagttggggtggtgagcatcttcccccctcaagatacagggtgtaagtttgaggtgtcccaccctgcagtagggaaatctgtagaataggagattgcagctctgaaaccaggccggtattctgggcccataggggcctagaggaaaagaaaaatggatacatttagattttcgatatatgggtactattgtcagacagacctggatttaaaccctagatcctctaccactgactagttttgtgacctttagtaaattacttaatctctttaaccatctgtaaaatggggctaataattcccacctcatatactttaatttgggaagagaagaagagagggttagcaatgctatttgaagcacagtgcctagcacaaagaatatacttaatacttggccaggcacagtggctcatgcctgtaatcccagcactttgggaggctgaggcgggcagatcatgaggtcaggagatcaagaccatcctggccaacatggtgaaaccctgtctctactaaaaatacaaatattagctgggcgtggtggcgcatacctgtaatcccagctacttgggaggctgaggcaggaggatcgcttgaaccccggaagcggagattgcagtgagctgagatcacaccactgcactccagcctggtgacagagtgagactccatctcaaaatatatatatatatacttaatagcagcagtagttgttgttttataatgctacttcttaaacctttttatatcttgtttcccttctaaaatgtacattttttgaaaacatgaactttgaaattaaagcatttaataaatatttggtcactgataaatattctcatgctcaagaggctcttctatatctttttttgttgttgttggtaagtagttcctcggggatgcacttatcttttgcttgagtaacattttaaaaagtgattctgtgcagtataggtggcatatttgaagaataatagcatgcatttatttcaatactcttgtgatgtagcttctaagttataggggtcataaaaattaactagtttcatagtatgcaaattattatgagaatttagtgcttcaagttggtaattcaacagacttcttttaaatgatatatcattttttgaaagaaaaggtgtttctaaaatactattttcagtcaatagaagagtaagattcttacttataaaactttagtttgtattaaacttttcaggaatacatcttttgctaaccatattatatcattgctaggttttatgtaaatttgttaacttgttatttaggaatactgtttatttcccccctcatgattatattgtacattctttgcagagcatgaagggcaaaagcaaaagtagtcatgacttgcttaaggatgatccacatctcagttctgttccagttgtagaaaggttagtccattgttgktatgatcctaagttcttaattttctggctcagataattttcttgcttcttctgtgagtaaacagtcagtcctcataagtcaaaaatttttaagccagccaaaaaaataaagcattttgataacagagatagagaacttcaagcttgatagagagaaacaaacgctctagtcactttcgcacttgctctctacctctgttgaatgaattacatttaaaattgttttaccattacatgttaggactagaaactgtttgctttaacagtgtaatgcttaattcaaggttgttttgctaccttttccttgaagcatttttgccttaattgtatcatgaatgaacaaattacagttaaaggtttttgtgaagaagttaccagtttgggggccagtccactgactataaattctcacatactttgaggagttaacagaaagttgtcttgctacctttgttgcttctctttgagaagggaaaacgtcttggtgttagatgtaatagcacaagataaactgggccagtatctcaaggggcactacaatgctgttgtactcagtttagctcattttcgaaactcctgttttaagacaatcttttcttaatacccttctatttgaaggatttgggggtttttttagtcagaatatttcaagccaataaaagaaattgttttttgcagaccattgatcataaaaataacactgtcggttgttgtttgcttttttcctttcaaattctagtgaacgcatatatttgctaatgaatcatacttattccacttataaaaaatgactctaaagaatgtttccatctgttctataatgsctttcttaaattcctatgttgaaatacatttttggaatgttattcccagcaaactattctagatttttgggttacaaaataattgtgttagttttaccttgaaactaaaatttgtttkgcttattttttttayagtgaaaaaggtgatgcascagatttagttgatgtaagtatttattttggtattaatatagtttgaacaattcatagaaagtacaaaatttttacaaaaacttaattttgttcttaaaaagtaacgtatattacttttatagttatrtatgtcaaattttggaaaaatatgaaaaacagaaattatttaggtgttagaatatttccttactctaggggtgtgcgtgtgtgtgtgtgtatatctctctacaacattagaatcttatatatgaatttctagtctgtttttttctccccctcacataacattacgttaatactcaaacttcagatgttataaatttattgtattaaaagtttaaatattggtgtgtgggcatcctacatgatatatgggaaatgcttggatcagtaatttatagtagtgtctcctttttatatacacatttcaaaagattctcattcaagagtgtagtgatctttattagttgtagtggctaacaaagctaacaaaacagaaggaagattttcctttaatacataagagtcaagtttttcaaattatacatatgccactttttatataaaaacccattaatctgtgcattgtataatttactaggaagtacataactttccatgcatgaacacagatttatctattatcacagtcaaaagagaaggctctctatggctatcagtagtagatagagagaggatgaatatctgaccttgtcaagaaaagcttcctggaagagatgatgctatttatgtcttatatgagagttaggagttagctaagtcagaaaagaaagtgatgaagggggtgaggtccctctagctcagagaatagcatatgctaaagcatggaaataaggagagatcataccttatttakgaaatacaaacggaaatttaaagtttcaaggagtctgtcttgtgaagagcaaggaagaagagtattgaaggtaaggggaactgcatatacaaaatggtccgaagcaggagagtttggtgtgttctaagagctgcaagcaggccagcgtgaacagggtgtggtgacaggccagagcttcattacagagcttcataggccatggtgaggggtttgagttttttcctaaaaggaagtgaggaacagttgaaaggtgtttgttaaaaagaaggatgctatgatcaattttgcatttcaggaagatcactattggcgatattatagaggacaaattagaggaaacagactgatactgggaagctattgtaggaggagagcttgatataagaccacagctgtgagatgggaaagaggtagatttgaaagaggtctaggaggtgactgattctacactatgaggtgagggaggagtagtccaagacaaccacaaggtttctggtttgagcaacttgttagatgggtgcaaaagaaagcatagggttgaggtggagaaaaggatgaaaaataatgagcttaattttatacatttcaagattgaggtaatttggagacatctgtgtaacataatatgggtctagaagttaggatcaatgtataggatagaaagtaaaagtatagatttgctcttaatatcatgggtgagtgactaaaactgtgaatcctttcccaggaaaatgtactacattcacaaccaaaattatatgaatttgcagggaattttttttagatctcctgaggcctgagcatggaaggcctaggttggtggttgtcaccttttagtgcttaagaattacttaaacatcttgttgaaaacattcataattcctaccccagagattttggttcaataagtctgcaatgagggctagaattttaggtgttaataaacaactatgtaataccatctaaggaccagactttgaggaccagtgctttaggggtccacaagtctcaaattaagaatcctgcttcactacgactcaccagatcaaagaaagaatcacaaaagaaaaatgatccacttggggttatttcttccttcttctctcccctctttcttccctttgttcctccatctgtcaatgctgggcactattctaggagttgaagatacagcagtaagcaaaacaggccagaattttagctctcatggagtgtttgctgtaattggatgacagacaatacacatgcaaataattaaaatatatggtgtatcagataggtgataagtactttggaaaataagccagggaagatgaaagagtactggaggtaagtgtgtggttctaccattttaataggttaatctcatcaccaagagggtaacatttgagcaaagatctgaaggagatgaaagagcaagcaatgaagagatatctggaatagagtatttgtttcaggctggagagaacaacaactccaaagttggctagtgttggtgggctggagttgtaggagattatgtcagggaggtttagattgcatagggccttgagtgagttggggacccactagagggttttcacaagagaagtgattgctgtgacttggattatagaaatctcagcttctgcactacacctcttctacttgaattgatccctgttgaggtcagtatgctggccaactgccttcaaaagccacatttcccactgagataagaataggaatatagacagaatagcccgngtgacacagagggagaagtctgctgcacaaaggagctgggcatkagttgagcgaacagcctttcctggggtatcccataattacatagttggcttagagcagaacccagggctattcccacctgtagcagattcttcaagggcttataattcaaaacaaaagaaaacaaaataaaaaaaaaaacctagtttagaatgcaataaggagattcagtggatgcaatagatctctagaaatgaaaggggaaattgagcacctggcaaatactcattttccatttctacaggatggagaagatgaaagtgcagagcatgatgaatatattgatggtgatgaaaagaacctgatgagagaaagaattgccaaaaaattaaaaaaggacacaagtgcgaatgttaaatcagctggagaaggagaagtggagaagaaatcagtcagccgyaggtgagtcagttactgtgctagatatcagagtttttgtctttttatatttcactttaattcagattgaatcctctcttcagctaatttttaaaatactattttcataatgtttgataaacataacagttgtacaaattggcccattagcaggcctaaaataaaatacaccaagcttaaagtaaacataacaatgatcctatgagttcaattccattttatttctctctgatccttttttagaaaggctctatactttcatatatatagggtaataatgtattagctagatgtggaagaatgcatttgttaaataccaatgagagcagtagagtaattgtatagaaagaaaagagacatcctcaaataatttcggtaagcaaaatttgtcaaaactgatgaagaaaatgagtgagcctgaaaacattcttaaatatcttttcaagtctgatttmccaaataccatatacctatcctaagctcagtagtatcataaaataaatttcagcaaatggtgaaaagtttactgtctggtgatgaaagtttgttggatttatgactcaacattttattctcctgaaattcaacttaattgaaaaattatctcttttgtgattctatttcaactttatagtatacattttaaataatattgctttaaaaaacaatagtatttgttttcttcaaatactatttggggataatatgaatgtaactacatttaaataacattctttttccctatcatgtttctcaaccacatgtagaaaaacttaaaaaggatttccacgctatcattgcatagctccctcaattttttctttatgtaatcaaataaaaatgattcccagaaatttccactaaaagcatagcttttaacatttagaaatggtacttaggagtcatcttaaatgtcttttttccagcaatattcacctgacactcaagtaatcactgttgaataattttacatactagattatattatatataccatacatagtagctaatatagactaaagattttagtgatcatatgcatgcttctagattcatagagttgaaaaacctctcattcacactgtaacttttagttaaatcatgaatataattatggatacataatgttttattcctctcattcaaggcatgtgttttctgattttaaaaaattatgaatttttttaaaggttaggtttataatgtaacaaaaatatatttaaaaattttaatagatgagccaaccaaatatttatttatgttagatttaagtgttccttaaactcccaactcagtcttgtaggctttaatcaatttcaaatacttatataccctataatataaactataatttagcaatgctaaattttgtataagaactaaagttcatttttaatgtacctttcataagtgtctttaaaaaattgtttacctaatattaagaaaagtcaaagtttgcattttccaaaattgtgttcactcttacaattaagggttattcttaaaagatttccttggctgtagtatgggcctgatgaccaaacatggcattgatagctagatttaggaatctgatctatcatgagaatactggagagccactgaagtttttacaggcaaatgatatattgagattgtatttagtatggagaatggattgatagaggagtgttttgggctattatacaaaataccatagactggatgacttaacagacatttaaagcttagtttttatggtaatttcttacataggaacatatatatccacttacttatgtaaacaatttttctctttttataaatcagtataatttgcaaaattaaaatcacataatttgtatattcactgtagaggaaaaagttatattcaagtgcattgcaagtctactaagaaaattaaataaatttaaaaagtacgttaaatacttttctacttagaaaagtaaattaaataagaagtctccaaaggtggcttgaatattttaggtaaacatgagtattgtggacattgttggattcttttaggtaaaataattggcaaagtgtgcctttgtaaatggtgcagacagcacacatttatttataactgttctgttcccccacattttcattattcacattctctactctccctccttcatcctatctgtcctacctacaaagagaaacaaaagaaaaataaggtcaggatagaggagaaagtacagaatttcaaaaggaagaaacagttttttcctctagtgtagaaatttccatgattgtctcatgaccacgtatttttttcagttcataaagttgccaaaatcagaccctggcatggtggctcatgcctgtaatcccagctgctcagcaggctgaggtgggaggattgcttgagcctaggagctctaggctgcagtgagctatgatcctgtatgggcracagagcaagaccctgtctctaaaaaaataaaaataaattttaataaatttccaaatcattagtacttttggttatttataccagcgagtctctgaagttaactttatggttaaaaaataaaacaacacaggaaagctcyaaatgtactgaaaaactacaacgtggtaaaagggataattatatttaaaggaaagtcactgctcagtttgagttataatgggtatagctgccagccagataggatgtcagtgtgatatcattatctattcaaaaatgtgtactcttgatacatgagttttcatcagggtgtgcttgaagtactctattatcctttggtcattcttccatttaagcagtaggatcagaaactagactagcccaccagccctttaagcaatgagccgttcaaagtataattttactgaaaacgtgtggtattgcttctattggtaaggaaacatctggaatctgttaaagctggttatcacttttggatgttaaacctacacatgtatttattgagtgcttaatatttaaactggggaatgatatttaacagaataattttcaacaagtttacatatagtaggatcttctcctagtaatgtgttctcaacaatgtctctagttgttcatttgaaaaaagagctcaggggaaatacaaatccaaaacgcttcctagtttctctccttagagaatcggcacccttatatctattctgacttcctaggatttctaatcccttgtctcttccctttttaaaatgtaccaatcccactttctttccagcccaccttctctatgcctgtatcttgactactggatacagctcagcagaatcacacaggcatatacaagctggtattattatggatttctagattccagcctcagctgtgtctccagtgcttccttattactcactcgccacaatgtttacttcacacttcaaactcactcaacggatcacctggctgcttgtttttttatgaaatgagagtaaatttcttcaacccgtatttctttctcttccccgcttcgagagtaaaaactaacaaaaccattccattttatttcytgtccctacctccttcctatttatttctaaatacatatcatctagcttctcacctaccactccactgaaactacttccactaaggccatctagttgataatcgactggctactttccatttttttttcttggtcttcctgctctggagatttttgtctcttttctcttgagactaatctctctcaagaaccttactatttaaagtgtgatctgtgaagcagtagcattagtatcacttgggaacttgttagaaataccgagtctcaggccctgtcctacacatttttaattagaatctgcattctaacaagatccccaggtgatttttgtgtgcattagtttgagaagcagtcctgtagaatattaatttttatccctactgctcctggatgagttcaagtttgtatcatgttagttccaaggtcagcaagttgtcagcaagttggtactatattccctgactccttagtgcaaacctatgtgcacccttttcacactcctgtaatattaggttacatatacattttttcttctttgtgtatccttatactgtaactttcttgaaggtagtgatcatatccatttacatttgtatctccatgttcaaacagcgtaggtacccaaatatttttgtaaatacatgaacaaaaaatgaataaattcttctttggcaaatcactttctcctctggatcttgtaagtagcttgcttgtattttcaatagggatttattgattcgcctctcctctgcctaaactaagctctttagagactatgtcttatttatctttatatcctcagaggcggctaatatcttaagcatatagtaactggtcattaaactttgtggaatgagtggataaataaaatatttaattaattatgttccattataggagtggttttcactcctaaccgcacattaggctcacggaggaggctttgaaaaatactaattcgtaggcccctcacccacagattcagaattgtytggtctgaggtaaagtctgggaagatccttytttaacttttaaacttttaatttaagtataatatacaaacaatgtgtctattaactatatttcatagtgcacataagtatacagctagmtgaatttttacaaactaaatatatccatatacccatcacccagatcaagaaacaaaaaattgccattacccataaattcacctcttgccccattctagttacttccccctcatctcctaatagtaaccacttttctaacctttaaaacaatattatttttaattgacaaatagtaattgtatatatttataggttactatgtgatgttttgctgtatgtattcatggtagaaagattcgatcaggctaattaacgtatttatccacttcagcaacttaccttttttgtgtgtggtgaaaacattaaaaatgtattcttttagcaattttgaagtacattaactgtggtaagcatgcattacaaagcttattctttttttttgtttttgagacgcagtctcgcyctgttgcccaggctggagtgtagtggcacaacctcagctcactgcaacctctgcctcatgggttcaagcgtttctcctgcctcagactcctaagtagctgggactacaggagcgtgccaccacgccaggctaattttttgtattttcagtagagacagggtttcactgtgttagcaagaatggtctcgatctcctgacctcgtgatccacccgcctctgcctcccaaagtgctgggattataggcgtgagctactgtgccaggccacaaaacttattcttctagtctaagcaaactttgagaaatgtctgtttaggtattttgcctattttttagttgggttatttgttttattgctgttgagttgtttgagttccttatatattttgtatattagccccttatcagatgtatgatttgcgaatattttctcccaatccatgggttgtctcttcactctattcatttcctttgctgcgcagaacttttttagtttgatgcaatcctacttgtctatttttacttttgttgactgtgttttgggagtcctatccaagaaatcattgctgagtccagtgtcatcaggctattccckcctcttttttttttctagtagctttacagtttcaggccttatccgtaagtcttttatccatttggagttgagttttgcttatagtttgagataaaggtccaatttcaytcttctgcaggtgaatatccagttttcccaacatttattgaagagacttttctttatatattgtgtgttcttgacacctttgttgaaaatcaattgactgtaaatacctgagtttatttctatacttcctatcctgtttcattggttgaggtgtctgtttttatgcaaataccatgctgttttgattaaaatagctttataatacattttaaaatcagagagcgtgatgcctcccactttgttctttttggtcaagattgcttaggctatttggggtcttttctggttccatactaattttaggatttttttttctatttctgtgaaaaatgacattgtaattttgatagaaattgcctggaatctgtagatcactctgggtagtatggacattttaatattaattcttgcaatccatgaatccagaatgggatatctttccatttatttgtgccttcttcaatttctttcaatgttacatagttttcagcagacagatcttttagcttcttggttaaatttactcctctaagtatttttttaatgctatttacttttctcacatctaagagcatacattaatttggggcaatatactttatcaaagctctgtagatattctaatatgcattcagtgttaagaattctactcccaaacacatacctccttgattatttctgaggtatagaataatgtaaaagtggatgatattttgtagggttacctcaggtctttcacagaacttttgcagttcaacagggttaagacatttatctcagctgcacttgattttaatcttaagaaagataaaagggtcaagaaagtgagaatcaagtaattttagagaaagaaaataagatatttgggtgtttctaatgtttttttaaaatgtggctgataaggaataaaatcagtatctctcaaccttgtttgtacatttgaatcatcccattcctgaacaagctgttcataaattttggtattcarccataagaaatttttaaaaacactccatgtaagtctaatatccagccaaggttgatgaaaactggggtagtttgcagcttgttttggaaagtcctattttaaagcttattgtaaagaatccttttttgcctgtaggtggagctcagctactgcaagttgatcatgtaaatcagattgtgttgtctttcctgcttgtttttagcatctgtatattgatacataataaatgactaaacaataaaatcagctgtaataagtggaccagatagtaaaaaatcagtggtttgttaggatgattacagcattatagtaatgctatcttttattgtgcaatttctatcatctataattttattgtgattctaaatttttattgtgattctaaattaattacatcaaattgaaatataaatgaaagaaatcttaacatataccttaaaatcacaatcattaaaaatttcatgataatctttacggttaactagaagggcatcagtcttagtgtttgaacaggttctaactttatcagccatgttctacttatatgccatgtttagttgactgcagcactgttccatttttaagaaaaaatgatcttatttgataaagttaactggaatttgtgttttgctcaggagttctgttaggttgactgaatatgagatatataactataatgatagcatcaggaatttagatatgaatattgaagttgaaaataaagatcttatgaattgattaagctctaaattgtggagcatgggataatagagtcatgttttcataccttctaaggtctggatgaacacctaaattagctgttagtgtttcagatcttcttttgttgggtttgaaatatatgattaggaattcttatggaactttggatattttttccccagaatttctagacttctcagaaaaattaataagcttcttctcgtacttagataatttttgactcttactgtactttgtgtctggattctcttactttatggttagatttaggaagtacagagttatccttagtaaataaacattgtttgctttaggaaatttaaaaagatagttcaatatttaaatttcaaaaatttaaaggatagtatacatttttaaatgatagtacaaattaaaaaaaacaggttagtaacaaacattgaaacccacagatattataacaacccaattcaaaccattgaaattatcatctctaggatgtgcctctcttcatctcacagaagatttataagcaaagagtgaaattaactaggactagarcatttctgcttcctttcattctcttttgtcccaacgtgttggactgaagcagacagtaaaagaaaggaagagaaatagaaatccaagatctatatactgggtagttggtctctgaataaagaaaatttgcagttgtttttttgctttggtatggagtagtagtaatccaaatgttgtattttcaggaaatctttctgtttaacagcaaatattaagctttggaccagtctcaggtttaatgaaatttacatgctaatttttactagaacttgatttttatttttgtatattttttcctaaccaatcattctattctcaaatatatgttattcgtgttcccagccactgtgtaagaactggtgcgtgccaggaagtggtaggctccaggaacatgaaaataaaggagatatggtttctatctggaaatgttcacaatatagtgtaagaataagaattgtcaacaattaattacaattcagtatgacaagcgctctgctagacgtgcatacaaagtgctatggatgttaagtaggcagtatatatttcaggaaaagatcaaaataccagatttaaaagggttgaacaaaaattgccatttttgcaaatcaaaaacagtcaaatatcagcaatttcatatgtatgactctgatgctaataaaataagtcattttttggagctactatttaaaaggaataacactttaacattatattcaattatttaaataatgttgcataatctctcaatgtagactaggtggtttgttttaattgcctttaccagttatggttaaaattttggaatagtattaattgtaatagaaaccatactatatttrgcatttctggcaagcttccatttttcttctgtttggacattaatagcaataatttttggatattctggactaaacygtttcttgggccacttgaaataaaaataccacttttaaagtgcctattcagttcattgagaaccagttaatccgtatccaaggaatcaccttcaaaacaaacaaacaaaaaaaatccttgaacttcagctatgtatatcagaaatatgacaaccctactgtttttacaattagattttgtatggcagacaggaagcagtgaaatgcacatgtgggagaagcttctcttgtcaaaatagaaaagaggtatttgcatctctttagaatgtattgatttatattatccttgagagttagaatccattgatctcactgcatcagtttatagggaatagaattgtgcatttgaaacatagatttgacattatgtgcagaaaaacattctttaagttattcagcattggtctctaccccggaacaaatatagtcatgttgaaaaattgtgaaatattcactgctttctggcctttttaggccatatactgtgaattccctgtaaattaaattggaaagtatagtttgggaagagaagggccactgaagaagtaaagttcttctttgttttacacaaagttggaagtacatgaagttatgcaagagcctgagggaaaattataattagtgattttatttttgctatctctagctcttcttttactccccttttcctctaactcaagcttgtccaacccgtggcccatgggtcacatgcagtccaggatggctttgaatgcagcccatcctgggctttcttggcaaactttcttaaaacattatgagattttttttgcgattttttttttttttaggtcatcaactattattagtgttagggtattttatgtgtgccccaagacaactcttcttcttccagtgtggcccagggaagcctaaagattggacacccctgcaactgttcaggggctttactaccctttggataccacttcggttttgcacagtcatttagttcttcctttgaactaggtactgcactggggcccaaaatactgaaattagtaagtatcagtctcctttcaagttgcttagtttctaataagcaacttgaaaacaatacctaacctatacaaatgaataagggctgtgaagggttcataggtgttctggctaggaaattgttctgttattccacagatatttattattattctaccttggggtcagacactttgctaaatcaacttatttccctaatataacttccacagcaaaggtataagatatactttgttttatgatccttcttttacaaatgtaaaaactgtactttaagaggttaagtgacttgcattatgtcccatagctagaaagcagcgacaccagtacttgaacctgcaatggtatgacacctctacagagcctagagaggggttggccagagccaagtcatgtgtgtccagctaaagaaagactgacatgaaatgttkctagcaaagatgtgacattatttcacatatattataatataactctttgtaagcataggggatggattagaaggagactgaagcagaaagacgaattagattattacactagtccagggagaagtaataagggcctaactaaggtgtagtatctgtggggatggatttgagagatattaaggaggtagatttattaagacatggtaacagattggatgtaggagacctgaaggtatatttcaaatataccaaaggtatattccagatgactcctagttttctggcttggaagactggctaagaagtagtagtaataagcattgagataggaacactggatattcctactcctctcctcagatatttttgccctgttggtcctttctgatatacctctgttttgctacacataaacgtatatcctgaattgtttcttattcaattgctttctttattagtcagctatattaggttatgcacccaaatctcagtggcttaaaaatctcagctaatatttgttttcttgctctggctacatcctgatgggcagctgtggatctgctccacatcatcttcattctaggcctgggatgaaggaacagctcctctctgaaatgtgctactctcatggcaggaggaaaagagtgatgaaggaatgatatgctggctcttaaagcgtctgcttcgaattggcatatgccactttatttcactggccaaagcaagttatatcgttaagcctgatgtcaataggatgaagtataaacctttcatagggaggagcagtgaactgttggaaaagataatgcaatctactacagtctctacgatttaaacagaaattgctgtctacatctatgactatgtagtaagtttgatcatcatattcctggcagcctggaggaagaaaatggcaaatataataaaaattatataattaccattacctgaatttttaaaaaaactatatatcaattcctagttatttcagacttctagaagtacaaaattctaaaggaaattttatcttatcagtctttacacccaagggtggagaagaatacagtggatatcttccataatttcacagatgaataacacttcatatacatacaacattaaattgtaactttcttattagatatcttaagaatcctttggttataaggaatagaaacccactcaaattagctcaagtaaaggaatttctgtatgaaggaataggggagttgtatagaatccagataaaagaattgcatacagtcttttcaagaaagcaagttgtcaggaagttacattttctctctttttttgcagcttttctcttatacttttcttttattcatttgttccattatcctcacatacctgttttctccatagagctctagtctgctacttgttgcagttgagttcttcagaagtaaattgactggatttctgtgtccaaaatctgaatatttgggagagagaatcttattggcgtggcccaggtcaggtgtccrctcaattatgccattgatagaggaaatggaaagccacgaagtatgcagatgtggcaaggatgggtagctcctccaacatctatccttccttccctcttaccagaatgccagtgtttaactggagtcatggctgcttaactgaaacacattcatcagtctccttcattgttaagtatggtcgtatgaccaaattttggctaaagaggtgaaacagaaatgtgtcagacattcaggccgtcttttttaaaggaaggaagaaagaagctagccctctttcrtacctgcctcttcctgtcagcctggcacacagatttgatgacttgagctaaggacggtagaatagagaggagcatgcgtccttgaagacttcgtggaaccattgttgcagcttgaaatgcctacctctggacatttcctatatgagataaactacctttcaggttgattcagtcacattatttgaaatttctcttatgtgtggtagaacccaaaatgatacaaggcagctttttttcaggcctgtgaatagagcaggttctctaagatgggaatacagcagggaggaaacgaatggctgcatcattatttctaatagtttttgtagttgattttcttgtttttcctggaagagagtcatatcactttgcaacacccagcatctctacccctcttctcacttttggctgatcaccttgtatttcattaagaaacagaagcagtgagagagaacttgttccttttcccaccaccaaatctacctatctgcatctgaatctattttcttctggcaagggcaaccccttcactctgtgtcctggtcctcatatccttttactttctcatatgttttggccgtgctattacccactttactctttttgctcactttgcaccaagcatattcttctcataccaaggtcactcctctttcaggcctctgcacttctagttacctcagcatgaaactttcttctctgagttattcttagtagccattcattctttttgttcagtcccttgctcaaatatcatcttaacagagaggccttttcagactatactatttaaaacaatttgcctctattctaccaggggtacttattcaagtgacctaaagacaaatttataaaatttgcttgactttcataaaatacatatgttaggatctactcctctaaaacaacaacaacaacaacaaaacctcagtaggtttagtatataatttagaaatcatttttttctacaaagttctacaactttttaagaactaacaaccactgtagtgtttatcaacattaatcttctaaatgagtggatttgtttaattttgttagttttactgaatcttggcctttatgtgtaattgtcttataacagcagacacaatataaaccattcagtaatgacctactttgaagtctcacagaattcattatgattatttcctagctttttgctagttttgatatgttagtgatatttgatctctcctccctccttactctttattatttagatatagctataccatgagtctcagttatttaatttatgtgtgtgcatatatattgatttaattgtttttaccatttaaatgcacctatgtgagtgttaagccttcagtaggatttccatttttattttgaagcacatcagtgccttgttatatctttaaatgtaatttcacatttgatttattttttgtgtactcacatttcttttagagacccttaatacatgttactgctttttctaattcctaattttatgttgtgaacttagcctgcttttcattttaacatttatggtgttgatttacctacttctttacagttatcttattttaaaagtctaaaaattatatgataattggtgggtttctgctctttctgaaaagtacttttcttaaggtcaaaggcagatgttaattggcatatgagtttaagttgctgaatcacttctttttaatctgtattttcaatttgttctggaaattcattagatcaaaggtatgtatgtactcaatagataggaagttagatttgtccttactgtatatttgattttcttgattctattgaaaaaagaatgttttcttagctttgaaagttatataatgacttcctgccaatttcttcttccttttagataagcgtttactttagttttattagtcattacaaattaatagaatttccggatatgctttttttgctcacaatattgacagtaacttgaaatattttaaagacaggctttgtttaatgaagttaaaacgaaaagcctttggcttggctccaaagcatccagataaatattacataggcctgggacaaagactagggtgttatgggaccttgtattttatatcctgctgctgtttggtaagagtaagttttgggtgaagtatgtatgtacatgtctagtcacctataaaaaatgatatatgtagctgacctgtggaaatacatttagtgtgatagaaggtgaggttatctaatcctgatggtactggagaatagcccagaaatcaaagaccaggataacattgcagttattcaacagccttattgtttggctttrtactcattctcaggtaggatttcttagtattttagtgaagttttaaaaattatgttttgttccttttattgttttagcctgtgctgtatagtatgaaaataattatagaacaaaatgtgcttaccttttagtagctatttaaagatatttgctcctaggttttatggtcaattaattagtaatgaaaatacacatgttgcttagctttttcgtatatgttgggagcataggtgaataaaggcaaataaagttaaaaagcaagttgggatctagattattttgtctttttaatgctaggttcggatgtttgcagaagacaatggtcacttgactttaaggagacaaagtgagaggkttccttttgttagccaaactagctttatttctaaattgtgtcagtgaactataataattttcagtgggacaaaagggacatcatactggacttaataatacctgggtgatgaagtaatatatacaagaaacccctctgacatgtatttacctakgtaagaaaccttcgtgtgtacccccgaacctaaaataaagttaaaaaagggtgactgatatggtttggctatgtccccacccaaatctcctcttgaattgtagctcccttaattcccacatgttgtaggagggacccagtgggaggtaattaatcatgaggctgggtctttcctcgtgctgttctcatgatagtgaataagtcacactagatctgatggttttataaaggggagttcccctgtacacgctgtctttgcctgtcaccatgtaagatgtgactttgctcttcctttgtcttctgccatgatcatgaggcctccccagccatgtgaaactgtgagtcagttaaacctctttcctttataaattatccagtcttggttatatctttattagtagcgtgagaatggactaatacggggacaaaacacctattatagtacttaagcatggcctgcaacacaaactgacaacttaggactcttgcctttagaaaggaattacaacctaaggatggttaaattgcagcatcactgctttcagtctttggtattatggtcatagtttgggagaatgtttgaattaccttaattcatgcagtttaaggtcattcagagctttttgctattaatatgtataaaaacccctactaaataattttcataaaactgataaatagtgtttattccaacaaagacatatatgagaaaattttcagtttattctttcaaaagttttaactaatattttaagagtgtttgaaagttgatgctgtgtatttatttgaactgttcttttttttaaatactgtaactgctcaagattactttagatgaacacctggcacctaaaccgggtataaacaaaatggaaacaaataaaaccttacaaagctgtaaatctgacatggaaatatactatgccaaagggcacacttcatctgggctctttaaggtgaaacaactcccagttttcagccagagcagtgacctggccttagtatattgtgctattgtacaacagtctttatctgcttcacatcactcaagttctgtttaactttttgttgttgttgttgttgttatattttcattctaattcttagaacaaaaagaaatccttttacagagtatgataccttgaactagaagagccacttaagtatatgtgaaccaatatctagagtgtgacatacctattaaatcttaaagaaggaaaaaaaaagaaaagatggttaaaagatagagagatagatcagtgggacagaatacagagtccacaagcagacctacacaaatatagtcatctgatttttttgacaaaggtacaaagataattggattgaaaaatgatagtcctttcaacaaatggtactggaataattggagatctatgtgcaaataaataaatcttgatacataccttatattttatataaaaatttactcaaaatggatcatagaccaaaacataaaactattacacttctagaagaaaaagagaaaatctgtatgaacttggggtttgacagtgagtttttaaacacaaaaagcatgatctgtggacaaaaatgatgaagtaaactttatcaaaaaaaaaacaaacctttggttctgtgatagatgcttttaaggagattaaaaaacaagccacagactgggaaaacaatatttgcaaaccatatatctgataaaagacttgtatccagaatatataaagaactcttaaaattcaactataagaaaacaaagcaatttttttttttttttttttgagagagtctcactctgtcgccaggctggagtacagtggagcaatcttggctcactgcaacctccaactccatggttcaagtgattctcctgcctcagcctcccaagtagctgggattacaggcacgtgccaccacacccagctaatttttgtatttttagtagagacggggtttcaccacgttggccaggatggtctcaatgtcttgaccgcatgagccaccatgcccggccaacaaagtaattttttaaatggtcacaagagcttaacagatatttccccaaagataatagatgaggcaaataaacgtgaaaatatgttaatatccttgctgagatggactattaagccaaaaaggatttaacattttctatgtattgttacttcacacttcagcatatagtgaataaggaactagaggaaaagaaagtttaaggcatatttgtttttaaaacttacctgttttaatcttctactgcagggaacatagagcttacattctagtactaacccttagttttttgttttgcagaaaatcctgaagctgctctctttaccataggatcagagtggtattgcaaaaagagtaggggaagaatggtgaagttagagagctttcccacctttccctaattgtgtttttaaaagtttaacttattcaggattactctcccagaacttggcaatataggatttaaacacagatatccttgacttaactgccatattatacctccgttgagatgagggttaaggaatgggatattagaatggtgtaccaaggatatagaaagtaggtgcaaggggataggtgagagtttgatatcctgataactgcaggaacttttgtacacatggttgcatgtctgccggaattggtagaaagtgttagaaaaatagactggggccaggtcatgacgggccttgtatggcgtatttggaaatggactctgtcctttagatggtagaaaacaatacaaagatttaaagttggaaagttacatgattagggtttgtttttgggagatcaccattgtataataataacatggaaaataaactgggaggagccaaggttagagattgaggagacagacatgacatgatgaaaaccttgaagcagtgttctgtttgataggtaatttgcatccatcaaacagtttttcagacatctacaatatccaagtggcataaagctctcagctgagccagatagttagctgtgtgtatacaaagaaatctatataaaacacaagattagagaaagtacagtagcttcatggaacatggagagattaattttgaatttatggattaggaagtctgcatgtatgcaagtagcattaattttaggccttgaagaaggggtagagtttgaataagaggaaatgggtggggaagggaatttccagaagaggaaactgagaaaagtacagggtgtatttgaggaataatctattgtgaccagaggagagaatatagttggaaataaagctggaaaagataggttggaaccagataatgatttaccttcctgtataataaactgtaaatacaactcattttgctttatttgtgtgttatttcaagtgtacagataaacatattaatagattaawttttttaaaactagagtaaatcaatttgaaggattcaaggctggattaatattgaatttctgcatttttggaaaagagtaatatgagtaggaaggtttgttaagattactattttagattattattttactttttacaatttgaaaatgaatatcaaatcactacagtaaatgaggtaatggtttagtgagaagaatgaatttacatagcacgattaaaacaaattttatttctagcactaggctagaatttatttgaataacaaatgttactcaaatttaatgacaactgtgatctatgaatatttaggttctgatgccagcattgtttgctagaaatgagatctgagtaaaccaatttttctgaatctcctgcttcctcatcagtaaaatgcaatcaatacctgcccttcctatttcagtagtgttttgataaggtcaaatgaaatgtgtacatgagaccacttttaaaacgtaatgccattgatggcctgtgattataaagttgaaagtaccattgataccacacagtccagttctgtcatttaacaaccatagagcagctcactgtctgatactctcttccaaccatggcgtatttcaaagtaaaattaaaaattaatttgtcaggtaattgacaatagttattaagcctatatggcaaccagagtattatcttttaagcgactgtatttaaagggtgtagttccaatgaagtagaattaatgaagccagtctatagggatagggaaacaagacaagcctacctacaaaattagtagctattatccttcataagcatcctggttttcccacctcctacatccctctgttggatacagagaatgacttggcatcagatgcaattactgcctaactcatgctctgtaaaacatgagcacatgaaattaagaaagtaatacattaaaaagtaccaaatagtataaacagactgagcactctaaatacatagggaatctctgtaaaatgttaagtcaagtgaagttaaatagaattttcctgaaggtgcgttttaaggcaggtttatgctgccaaccagccggaactcaaactggagtaagtaggatataagagtaattttgctagtgaaaggaatggtctcttttaagataatatttgctaattgtattttataaaaattgttaattatttttatttcttttgtttaattttgaatgtttataaaaaatgaaagcattatatttgagaacatcctgtttataataaaaactttatgacaacctcatagaacaaaaataacgtgtctaccaatgtgattatagatatgttcactgaaggaaacaaatttaaaagataaagttctaactttatctagctagtgaatgcaagtgttttattttagaaacataaatgtccttgctgaaaacccaatgacatttattgcttaggaaaacatcttgctttattttttccatctatgtgttttttaaatatagcacttatagaaacacttcaaatcttactaaagaaaacaaacataaaatgtcactctttaaaagaaagcattggtaataaagtcttcctcttttaatattattattttactagagtatttacaatattagaactttgttatgccaagagttttaagatatagcttaagagttttaagatattgttttagaagatttttttctgtatgttattcatttatgaatggaatatttttatggactaacattacttgattttctgcattcagcaagatggtgaatgattagtaagtggactactaaagatggttgtgcatattgtgacctgaaaagggaagcttagttatggaatgtgagtatgggctgaaatctagctggggctctactcaccaagccttctgcactggtgtgagggtatgtcagtcctaagggtaccttcttctaatccttcagtctagaaaagttttgtgggttttttttttttttcctctagaaggcaccccccaggggaagtgttcctttcttttctcttttttttttttttttttttttgagatggagtctcactccgtcgcccaggctggagtgcagtggtgcgacctcggctcactgcaacctccgcctcccaggttcaagagattctcctgcctcagcctccctagtagctgggactacaggcacgtaccaccatgcctagctaattttttctatttttagtagaggcggggttttacccgattagccaggatggtctcgatctcctgacctcatgatccacccgcctcggcctcccaaagtgctaggattacagacatgagccaccgcacccggccagtaagtgttcttttctaattcacagaaaggtgcctctcaaggtagcctgtggatacatttaagaagtaaaagaaaatgagcaagtaggtataatggcatgttttcccaaaagctacagcacagtaaatcaggtgtgtcaaatttttagtaacatataaggcaacttggagaccgtatgttgcaatggaaagagctgtgggagggagtttggaaaccatgcttatagttttgcatgtctcttccccaactatttgacactgggtgttcttttcttaaaaatgaaagaattgaactacctgctacctttaagggtgcatctaggtctcaacttctgtgaaagttatatctggaacgtggtaagcagggagaggttggaactaacaatttaccaaattggcaagtttcctatgttattaaaagtccttgagatatatgtttacatgatctgtattagtatggcttgaaatcatgtagttctccaacttccttttttctacttatttaatttgctccttctgctcttcccctttttcttcttgtctgttttggggttttgttttttagcttttaaagatggaagtttagatgattgattctgaacccctcttcttttctgatatatgcatttaaaacttgaaatttccctctcagcactgctttgtctgcatctcaccaattttgatatgttgttaggatggttggttttgtaagtcagcttggtggggcgatggactccagttattccatcaaaaactaatctaggtgttggtatgaagttattttgtagttgtgattaacgtctacaatcagtgacttaggtaaagcagattatcacagataatctggggacctggttcaatcatttgaaagtccaaagagcagagctcagacttccctgaaaaagaataaatttcgtctgtgaatagtagcttcagttcatgcccaaaagttccagcacgcccttcctgatggcttgcttgctctacaggtttcagatctgcctaggcagctcccacaattgtataagctaattctttgtaataaatctatctatctatctatctatctatctatctatctatctatctatccatccatcaattatctatttatctgtcttctactggttctgtttctctggttgaacctggactgacaaaattgtgttctcattttcattcagctcaaaatgtttcttaatttcccttgtgactttttctttgacctgtgggttatttagaagtatgctgtttaatttctaaatatttgggaatttctcaaatatttttttgttactgatgtctacattaatttcattgtggtcagaggacatattctgtatgatttcagttatttgacatttattgagacttgttttttgtcccatcatatagtgaatcttggtgtatgttccatgtacacttgaaaagaatgtgtattctgctgtggttgtttggaatgtcctctaaatgcccccaatatttttgatggcactttagacttgcatgttaatgtttagattatacctagaaacttgcaaatttccttgatcaatcagtttttttgacaggattgcattcttgagaaactaaatgacaagtagtaagttctgactttatagttcactaattattttggttaataagttagtagtaatttttaactttggtgtttttttgttttttttttttgctaatatcacaatgtaatacaactgttagtttcatgtcttctgctttcagttttatcctgtataatacttagaaatcttagtttccttttcattatccaagataaatttttagttggtaaattttcttggacgtgtcctccttaattttcttcagagcattgtgtgtatatgtgtgtggcaattttgttgtctcaccctaagaaaagaaaaagtaaatggaaatgaaaaagcaaatcagcatattcttctctggaacaattttttcccacttttaagyaaattgtagtaacctaggttaaaattgccttttgaattttcaatgtgtttttcttttaaacaagcgcattgaaagaaaatagaaagttaacatagcaggtcttcgcatcctttccttagaagattcccccaatcctctaaataacatacttgatatttgtatttaatttacaattcatttaacacaaaattgtaaacttctctaatgagtaggaaaatggagtagataatctgtttaagtttcaatgaattgagaatattattcacatttgagatttggaaggtacctagaaccatctgacccagtatcttacctagcctcagaactcatcgtactggaatttatcccatgtcataagcttttataccacgtttgcatgagttttatttttccatgttgtttcttttcccattaccattagcaattgaaacttgactataaaaaaaggacttgtttgtaggaatcaggaatactacatttttatagaggaaggagtattgctttggagttaaacacatccaggttggaataccagctgtaccactttttaacttagtatctttgcctgacttatttaatctctgatcctcagtttccttattttaaaacagaaataaaaacagctattttaccagattgttgtaatgctaatatgaattagtaggcatttaataaattgtagctatttaaattatattatatcatattctctttttctgttttcaagatactacatacttattgaggacacagtagtcgacctatatccatggttttgctttscatagttttgattgcccacagtccagaaatattaaatggaaaattccagaaatatataattcataagttttaaattgcatgctgttctgagtagtgtgatgaaatcttacaccatcctgctttgtgctgcccaagataagaatcgttcctttgtgcaatgtatccatgctttatatgctagctgcctggtagtcacttagtagtagccatcttggtatcaaattgagaaacatagtatatatggggttttatactatgcgtgctttccgcagttttatccactgggagtcttggaatgtatccctcttggataaggcagggggactatgtattctctaataattttcagaatttttcaggtgattctttctgaatgcgttcattttactatgtgacatttttaatttaagaaaaatgtattaggcatttttaaagtagctaggatgagtcatttatactaccattgttttcctattaagtagyacttaatcctctgtcccacttaatyttcctatgccaaatgtttacagcacctaaatagaattatggaagtttaaagttgaaagaaccatattaactgtctcccagtgtcttagtccgtttggactcctataacaaaataccatagtccggctggcttataaataactgaattttttttttctcacagttctggaggctgggaagtccaagattcaggcactggcagatttaawgtctagtgagtgctcacttccttgttcataggcagctgtcttttgctgcatcctcaaatggcagagggggcttgagacctctcttgggcctcttttataagtaggattaatgcccttataaaagaggcccaagacagattgtaaacattcagagaatagtacccagtttccttattttacagataaagcttttatgaatagaagataagtgacttgttcaagattattttgttattgacaacctaggtcatctgagtctgaatgtaaatctggcttagttttacctgtactatcctctgaaagttcccaggccactcaccagtttacaacaacacatcaaattcagaaacagttactatattcacattatttccctctacccataaaatagttaatcaaaagagtacatgcaagcaaaagggcaggaagccacctagagaagctgatcacagccatctgtggtatgaggtatatggtaaatattcaaccatttatttaatggaatgagtgaatgttgaatctgtgatcatgcaaatgataatatcaatgtacaaaatgaaaatgtgatttttaaaatttctgtatttatttgaaccagattgtattataacaggatagttagattgctaatgtcatttcttataaaatgatttttcatgatttgaattttctaaaaacaagcctaacttctaccttttatgactcatgtgttttattctttttcttgtgagattatttgttaggtccaggaaattcagtcaatttccaattttagaattaatggcttaatgtcagtactgactcaacttatgaatggatcatgtttgtaattttatttgtatgttatttagaataggtaaaatttccctccagaaacaggctataattgatgttaatttttccccaatttgaaaaatttaatttgggatctgttagaactctactagtaaaaaaacaggtatcgagaaagaaatatgtaacttacatttgtatacatatacaaatgtgtgtatatatgtaaaatacatggaataccgttagaactacacagaaggcctcatatacttaattgctgaatatatgctgacaataacttcaatgctgagaacttcctgaggaaggaaaatcactttaatacttttattcacttttttttttttttttttttactataagttctgggatacatgtacagaacatgcaggtttgttacataggtatacacgtgtcatggtggtttgctgcacccatcaacccgtcacctacattaggtatttcttctaatgctatccctcccctagcctcccacccctctacaggccccattgtgtgatgttcccctccctgtgtccatgtgttatcattgttcaactcccacttaaaagtgagaacatgctgtgtttggttttctgttcttgtgttagtttgctgagaatggtggtttccagcttcatccatgtccctgcaaagaacatgaactcatcttttttttttttttcgctatgccatttttttttcttttcttttccattctttttttttttaattatactttaagttctaggatacatgtgcacaacgtgcaggtttgttacatatgtatacatgtgccatgttggtgtgctgcacccgttaactcgtcatttacattaggtatatctcctaatgctatccctcccccggccccccatgacaggcccctgtgtgtgatgttccctaccgtgtgtccaagtattctcattgttcaagtcccacctatgagtgagaacatgcagtatttggttttctatccttgcgatagtttgacaaacctgacaaaaacaagaaatggggaaaggattccctatttaataaatggtgctgggaaaactggctagccatatgtggaaagctgaaactggattctttctttacaccttatagaaaaattaattcaagatggattaaagacttaaatgttagacctaaaaccataaaaaccctagaagaaaacctagacaaccccattcatgacaggcatgggcaaggacttcatgactaaaacactgaaagcaatggcaacaaaagccaaaattgacaaatgggatctaattaaactaaagagcttctgcacagcaaaagaaactaccatcagagtgaacaggccacctacagaatgggagaaaatttttacaatctacccatctgacaaagggctaatatccagaatctacaaagaacttaaacaaatttacaagaaaaaatcaaacaaccccatcaaaaagtgggcaaaggatatgaacagacacttctcaaaggaagacatttatgcagccaacagacacatgaactcatccttttttatggctgcatagtattccatgttgtatatgtgccacattttcttagtccagtctatcattgatggacatttgggttggttctaagtcttgctatacatttattgagcatctgatgtgtgattagggcacatttaaaaatgatatgtctcagctggttcttcaaggatttgaatatgttgtctattatattatgttatgcttgtatcagtaattgccttacattacaaatatggtttatttttgagccacacatttgattttgtgtacttcagacattcagtagtgctcaaacaggtttactcctcatcaaacctgtgatagttttctagcttattatttctattttctgcttagtgaaaatgccatttttcaaaatgttgtatgacaatttcttgaattatagaattataattgctaaggtaattttcatgtttgctggttagtacattttcttccccttagggaagttgaaaatccctactttcctcccctccccccaccaccatgtgtatatatacacactcactcacacttgtagaagagagtgtagttttattcagcatttcttaaagtttttggcctcaggaccctttacaatcttaaaaattattgaggactccaaaaagcttttatttatttgagatdgatagatagatagatagatagatagatagatagatagacagacacatagatagatatggatatagatatagatatttactttattagaaattaaaacagaaattttaaaaaacatttgaaaaattacctataaggttttatgttgattacctgggtgacaaaattatctatacaccaaacccctgtgacacacaattgactcatgtaacaaacctgctcatgtaccccttgaacctaaaataaaagttggaaaggaaaactaataataaactccattaaatcttcacataaaaaacatacattttagaaaaaaataaccattttgccaaaaaaaattgagtggttttattttacatttttataactaataactggtttaatagaaggcagctggattcctatatctgcctctttattcactctgttgtatgtactatgttgtcttggtcaagctgtagaaggcaaatctggctttacatagatayataatgtgagaaaggaggactatttaatagcacatatatttgtggttattctttttttaatacttaaccaaaactcaacaagtagtaatttcttataagttgcatgcaatgtaaaatctaaaaccaaataaataaacccttcctagtctcttgtacattaaaatccattggtttattttgcactttaaatgaatcttttacccatgtgtgattttgtaatattgtgcattagtcatgtggaaagcattgatccatcaagttatgcagatcttccaaatgttgatacatcttgttctgtaatatccaaaaaakcacatttgttaatgtcatcccttattttcaaaaacatctttcagtgtttcggtaattccaaggtagtggttttgagttttctaaaattccaacttttgcttgaaagctcaaattttattattgtctactaatagtttgtcttttttttttwaatgagaagttcactttgtttccagattagaataacaaagtttgtcagtttttctttcaaatatcgagtataccataaagaaaaccagttttagctcacaattcatatattcgcacaagtgtttttcttcaaaacaactatcatacttatgtctgcagtagaagtgctttgtgcatacttctgttccataacacaaaatactgtattcaagttggaacttcataaaattaatattttttttactgcttcatcaaggatattaaatgaaactggcattttttaaaaactactgtgagcagagacaaatacaatgacttttagactttgctacaccgctttgactcatgcagcagttgtaccctcagtacaaatgtcaaaacagtgaaagagcaaatcacatttaatattattaaaatactatttacctcatagacgctcttgaaatgatttsagagtttcccagggtccacaaaccatacttatgaactgcttatatagtggcttaagagcatagagcacagactctaggaccaaacaaatctggctctgccgagctatgaaatctagagatctagagcaagttgtaacctgagttttctcgtttgtaaagtgaacttataatagtattacattataggatttgtgtgaagttacatgatttaaaatatgtaaagctcttagaacagtaactggtagatggtaagcccacgtatttccaaattattttgtattatacacacatacccccccacacagatttatgtatgtattccattggttctggatatttgaaaactccattcaggttcatctcactgctttcaaatcagctcatgcttaaaccagaacagataaatgacacatagtttagttctaaagatcctcagatacagttctttctgtattttgtttatactattttaggttgtaaagcacccactttgaatttctttgatatcagcgatggaggaataaatgccaccatctgtatataactggattctcttattgaccaatgcatgcttttgagattattccttcagcaatttaaatgtccttgagaggtatttggtgtggtataaagaggttgttagattgttttgcacttcagtgttaagtgatggcacaacttggttaatcttagaagttaaacaaccacttgtattgttctatgtaggcttttattttcagtttatgtattctttgcaacctagatttatttggaagttggtaactcagggacatactcaaatagttttgattttctttttcctgtgaccttcacccagaactttgtgctgaagctagttaccatttttgccacacaatgtaggagaatgttgagtgtctgaatataatcaaaattattctttccttaagttagacccatcatttattcagaacatataagctcttaattgctcctgtctttcttgaacatttgccggaacttctgattgaaagtaaaagtacctaaccatacttttggggccaacaggaaactttattatattgatcattaataacactggatgaaattgttctgttagaatagtaaatgagaattaccaaaaataatatgtatagtatcactaaacatgagatggaggaaaaatcagctgtgaattgttttatggaagcaatctcaaaagttgtcatgcccctcgctttttttttttaaagaaatcacattatatcatgaatattcaaatacattctaaagaaagtaaaaccaaattaagaaaaaaaactttcaggctttattgaatcatatctgtttgcgtaataaggtaacaagtacaacttttttctgtgatttttgtaaccagctgcataactctgctcttttctgatttgaactttcagtgaactcctctgtaaagctctgatattaagtctcctcatactaccttagtattcttttatgtatcataaacacaaagataactttttctttcttttttaaactaagggaactttgatgtaattttctaggtccctccaagagatctggaataacctcatattttgttttaacctcatgtttataatttagtttttggagtcctatgaaacacctttcactctaagttaaagtagatgataatcactcttgttagtttggccaaaaggtaatgctcagtacagtgacacattcaaaaagaaagtggagcgatttccaagcatttatcttaactgtatttttactgatatctgcccttccttgtctttctgctgtttgtttctgttgaaactagagtgtttctttgtaaactccaaggacacatgtgtattctatacctaggatccaaaagtttcccattcaaatgcttatactatcctgtttcttcaggctgtgtacacctaagctcttaatcctttcccctgagccatctccaaaagcaagctttatatttggtgaagcaagaattgtttctaaagattgtccttggattcagttgtagaacaggaaaagagtttgcaattctgggagtgtccctgggtcctaccgccaaaacaactgaaggtttctggagattgcatagtatagaaacctcttacatagtatagaaacctcttggtagtatagaaacacatcttttaaaatccaaattaacaaaacagaaatggataattttataaaaaatattttttcttacgggttttacatttataagggtaattttatttatttttgtgaataaaaagctatcatttcaggcacataatagactgaagaaagttttctaacaatagatgatttccacaaaaattattcactgtgcattaacatartgtctttagagagttgttctaatatcagaattagaaattttagttttcaaaaatttactgaataaataaatatttctgtgtaaagtaaaagtccaaatcacattttataaaggattatagactaagtcagtgttcctatttcccyttacatggatgtccataaagcaaatgtaatcctggctatggatgtcttatgcatgcaaaccctgtagattgctgaatgtttggcaaagataattatatattttggcttggcatgtggaaacagcaaacttttccactttccattatgtaaattagcagtggaaatagctctatatttctctatgatgtgatcttgctaaatataggtaatgtagattcatttctattagaaggaataatttgccacgaactgatggtcaagtttttggtataacttaaatatcattttgatatttgttcattgtgtggaacctcagtctcttttaacaatktatttttttctcctgaacatctaagtcattataggctctagcaaaattgattagacttttctgatgacttttgttttatatcttcatgttttatattttttatgaagaaaaccactgtatttttgcctaaggaaaaggacttgagtcttgtcatgatatgtgttgcttctatatctcttgtttctttgtgagcctatcataatccttgggactgctgaaatgtgagcaatcaaactgaaacaaagatttaaaaactataagtttaattttggtgataaaatgattagacattaaattacctaacccaagaagaaaatatttaatgaagcaataaagtagtttataaattatatcccactatcagtttagcaagtatttgaatattatattcaaataagtaaagttacatttaagccacccactcagatgagagtatattcttttcacatttatagataataatggtataatttagtgaaccttaagcaaatagtttacaattaaatttaaatattgctgaagcccctctttttcctcaaagtgcttagaaatgttacacctttgaggtaacctaatgttcatttgtggctctagaagacaatggacaggaaagagaaaagttaatctcaaggcagtcaggcacaaatagcactgattgcctgttactttgcaaagcattatgtggtatgttctatttttaaatttcactttactgtttttactttcattcaattgttaatcagaaatatctcctctgtggagatgtttttatcattcttggaactgcatggagatttccctttaataatactactgtttgcagaagtcccaggcatgtgaccttaaaacaaaacaaaacaaaacaaaaaggcaaatcattttcctacttttagtatgtggttaggartgagttggctcattcacatcaagcctaatttgatgtgagttagtatgaacctttgacaaaatccatggtttagaatttagactggaaggagacaataaatcttactgtttaaatcacccaacagagtaacagtactgtttgtaacatttctccagccttctttcccaaatctgttactctgtgatgtaaagccttggttacttttcagtacttttaaatttgtttgcagaaggtggaacccagaaaatgtgcccatcattgagtgctctaagtttagctgaggaaagcaaggacgtggtaatatttctgttccaaagagttgtatttatctgagttacaggactggtttacataaatgagaaactaagattttccatacaccargaaaagtttyaaaaggatggctttcgtgcttgccacttcatacccaccaaatgttacaaacaaatactcatgtctgcagtaagacatttgtgggtgtgcgtaattgcggttcacaagtcattcaagctcaagtcttttccaggtacaaatgagaaaccctcagaaaatgaggctctctctgcatttttggaatgagttcagctattaggtttaagaatttatttttttgcacaaaagtagatatatcagagggtcttttgtttcaagaaggagttctaacacctttggtgtaaaatggcattcttgtaatctttatcatatgtaactacatttttggttgttgagattaggagttgaagatgttaagctcttcaatagcctgcatagttttaattaacttttaaataagcagaccttttgtagacagttaagtttttaatgtgactccattgcttactttggctactaaagtgtcaaatttggttccaaaactcatgagaagattcaaaactcattctctttttttttttgtgaagaaaccagaaaatatttcaataaagttactgggtttaatatctagcattagtcttatctcttttaaatagcaaaatgactttgtcttagcaagaatatgaagcaagttcagggttaaagaaattcattttaccattttaccactgtattttccattttgacattaaaaaaaaagccaaacctcacctcacgggggtctctcttatttagaggtttacaacttagttaagctatgtaattttgctgaacattttcaaactacaaaatatgaaatagttgtcgccgatcatagaaacctctttactttcaaagtatttttgaagttgaaaacttttcatagtatttccttcagaagacgttttaaccttttcagtcttttggatgtcatacctaaaaagttgaagtgtccctcaaaaagcaccttagttaatactacatttttcctagagatttttagatgtctacatttatcctgtgcagaagttcagctccttagtgacttttcaactaatcaaataagcattctctacaattagtgttggtcatatagttgatttattccttaggaattagcattacttatttgatcaaagtcattagattgcttttactatcttagttttcctctaaatcttgtacagcattttgggtaggttatggattgacaggaggagaacatatacacatacatatgtacattcacatgtgtgcttttagctttatgtttccaatttagttaaccaaagatccgatgtttttagaagtaaagtcagagttgaaacagatgcaatatatcagcataatttctcttcatcacaaaggccctcaatagagataaacagctgctaataacaatatacatatagattatgtatatacaatatacagatagggttcctgaaccaggaaagttcatttcttactatgtcactgccctttttaagtcactattctataagagctaacaatctgtgggctattgcattttcatcactattccagggaacatgaactaataatctgtgggcttccttttaagggaatgtttataattaccagagtttcctggttgttgaagtgaactcagtgtcagcaaggacatgttctcatccagagggagaaagcagagctaatacccaggtgttctctgccacaaacttacaagtgctccggaaagcccatttccccataggtattaaagctgaaatttataactttgaattttagagtaacccagtaagctcttgattattttatgttagagaaaaggacagagaagtatggcaaacaaaattcaccaaatttgtaaaatcacttatgtttggatttagaatgatttttatactcaggtttgaatgtagccatatctgtcatatctgcttaggggatttatgaaaaataatcagtcatactatgaaaataatcagtcatactataaaaatttgacctaacaggaagtgagaagctgtttggtctatctctttttgatgagaaaagaatatctttcaaaaaacaatggaaggtggggccattttcagaactttaatggaatcctttttgtgaattcctaacttctgtctggcatatactaggtgctcaggaaatgtttattgaatgagtaaataagtgaagtacttgtattcattgagggctttaaatgtgtgrggtgcacagaatttagatatatgaggacaaagtcttgactcttaaaatatttgttgagaagaaacattcattcagtattcatctactggattttgaattgtgatggccgtgtgaagcattcaagaatgaagaagatgagagtttgaaaggctatagtatacagaagtatgtaatgggtgcagggttagaagcttgtgagtagttatatatgatacaagcagtgttaaggaatttaaggcaagaatagttgacttttgtgaacaaggaaagcttaatggaataggtagcatttaagctaggccataaatgtagcaggatgaagcaggtaggaagtaatttatttttggaggggacttgagaaagtacttggaaacragaaagcacagggcctgatgasggcagggcactgtaaaaggcctaactatctccacaggaaaatactgggaatagaagtgttgggctggaatgtagagatcttgaagcagactatttcggctttcttttgggatctatttaatatttttgagtactatcttaatgagatagattacagtgggggaagactagaagcaaaaagatcagttaggaatctgtggcacttatctaagggggagattaaagctcttgaaaaaaacacagaaaagatggggaaaagttggttgtgaaaaaagaagtggcaacttgacatgggaactgattgagtgaccaaagaggaagcagccaaagaggactcctgacacatcctataaagggacattgtaacttcagggtcatatgtggccagaagactgtaaattataaacccccttagatctagtctctaggggctctctttggaggaaactagtgcatataggctccctgccagggacatagcccttcaggcttgccctctccagagctaaatctctgagtctgtggctgggaattaggagccaagtagtcagtgtggtgggaaaaagtggcttagtgtgccaagtagagaagtgagcactgcagaagctgagatgacgaagaccaacagcaggagccagacagtagaggaattactgctgcacccaagcaatgtcctcaagggatgggaagatgaaactttcccaaggactgagcagaaggagttggcagaaaagagggttgattgttgttggcctttgtgtgtttttatcctttttcattaaaaaaaaaaaaaaaaaaaaaaaaawawawatatatatatatatatatatatatatatatatatatacttattaaggacattttagaaaacagaggcaggtaaaaatggaaaaaaaactttttttctatctgcatagaactcttaatattttggcataattttacaagtctttctatgaggcaggtttttttcagctgaaggtaacagtatgtaccacataaatgcaaaagatagctattaatgctattgtttgttactgttagtttacagtaagtagacagtagtcaaatcataaaagaacttgtattttgttggggagctactgaagaattttcagcatggaaggggcatgatcagattcatattttagaatggtttctttggcctaaatatgaacagtggattagaaggccctgaggcttgaagtctggaaatcagttttgaggccggatcataaggggctaatcaaggcattgggaatggctaggccaggggtaaggggactggataccaaagaaatttgagagctttgtaagggagaattgacaggatgtggggactgacacattgtgaaggtagaaaagcatgctatagctatctcaattaggtgtcccacagggacttcaaattcaacatttccaacacagaaattgtaatcattcttaccaaatttataccctgtctatctttgtccattttctgctgctataacagaatatgaaagaatgggtcattataagcaacagaagtttgtttggctttatagctctggaggctgggaagtccaagaccatggtgctggcatctgacgagagcctttgtgctttgttagcccatggtaggaggaggaagatggaagactgaaagacaagtgagggtgcaagacagagggaggaaataagtccaaacatcttgtttcaggagctcacacccataatgatgaacctattcacatgataatggcattaatctactcatgagggcagattgctcatggcctaatcacctcgtaaagatcccaccacttaataccatcacaatggcacttgaatttcaacatgagttttggaggggacatttaaaacatagcactgttctagattccctctctcagtgaatatacccttacccacctagttaccaagctagaaatttgaaagtcatcctgaagtcttatttctgtaatatctatcactacatctagtcagtcaccaaaacctatcagatcttccacataaatatttaagagtctttttttatatctttgttacctctgtatttgccaagtttaggttttctttgttttgtgtttttgtttttgttttttgaggtggagttttgctcttgttgcccaggctagagtgcaatggcacaatcgcggctcactgcaacctccgcctcctggattcaggcgattctcctgcctcagcctcctgagtagctgggattacagacctgtgccaccatgcccagctaatttttgtattcttttttagtagagatggggtttctccatgttggtcaggctggtctcgaactcccaacctcaggttatccgctcaccttggcctcccaaagtgctgggattacaggcatgagccaccacgcccagccaagtttaggtatttacttttgacttaaaatagtagttgacaaactgcagactacagacctaatacagcctgccatctatttttgaaatgttttaatagaatatagccattcttttacattttgtctattgctgcttttatgctacgatgacagatttgagtagttgtgattgagaccatgtggcctacaaaccctaaaatatttatttagtactatcgggtcctatacagaaagtttgcttacccctggtttacaatagtgtaatataactgaattccctacttgtaggcttcaatctggcctttcctacattgatgttttattttatttttatttatttatgagacagagtctcactctgtcacccaggctggagtgcagtggcgtggtctcagctcactacaacctctgcctcctgggttcaagcgattctcctgcctcagcctcctgagtagctgagactgcaggcacccgccaccatgctggctaattttttgtatttttagtagagacgagatttcaccatgttagccaggatggtctcgatctcctgacctcgtgatccactctcctcagcctcctaaagtgctgagattacaggcgtgagccactgctcccagcctatttttttttttaattagataggatcttgccctgtcacccaggctggagtgcagtggcatgatcttgacccactgcagcctccgcttcccaggctcaagcaattcctcccacttcagcctcctaagtagcagggactgcaggtgcacaccaccatgcccggcttattttttgtattttaggtggagatggggtttcgccatgttgcccaagctggtctcaaactcctgactcaagcaatccgcccaccctcaccctctcaaagtgctgggattacaggcgtgagccaccctacccggcctttttcaagttctaattgtttctcaagattcttttgccaataaaccctaaatctcagtcttcaagtcctttgtaatgtttcaccttaaaaggaatcatttatgtaagaataatcaatctccattaatgttaatgttacaaggtttactctttcaaggttttgtgtaaggattttttgatttatctgtgtttttctaaaatgatatttcttgaaaagcctcagtccactggttgtcagttgtatatctcagtacaaaggaagatagtaagtatttttgccagacattagctttatttgttcagcaagaactctgagattttctaagattttaatacctctactgttttcatttattttgtgactctgaaaagcccactaccatatgttatcaggaaactcaagagagcctttctttgacttccagattcacaacaatagaaaaagttaaagatagccactttctcggaaagagagaatagaatcaaggatttgctgcacatatgtgggagtattgatattaacatctcaattctaattaactcacattgagacagttttttgaagtgttaatgcattttatttgtaggtttagtctcaaacaaattccactaatgacataactcccaggagagattagcagtatccagaaatcagtccactttttatcctccacccaattaaaatrtaatattatgtaaatgttttgacatatctatatctagtaggaagaattataacagaagagaaaaaccttattttctaggcaaacaagtgaaatgaattggtagattttaatctggagaagttcacaggcacttaaaaattacttgcttatctttttctaaacattaacagaattttttatagtgctggaaaatcaaaatggaagtatagttatagtcatttaaatacctacatgattttttaaaatgtasagggtctggtgcctagtgacatcagcaaaataacagaagaggaagtctcaagctccacttccatgccctgcctcccactgctgcccctccgccaccccgcagccccgacccacaaagttcagctagactagactagagcatccttttgaaaactgctacacttggaaacaagcctgagatacctgcatgattttcataactgaataaaacctgaattagaagtgtaagaacggtcttattccaacagtgctgcccctccccttcccttaagtcaagcacaacaccagatggagatttttttccctgaacccagaatttcaacaggggggaagggaattggatgcagtcatccagcatacctagcattctgatatgcttcttatgaaacccactccgaagcaatcagcatggctagactgcctggagtcgggtagaaataaaggaggcagaggtcatattgaccagtgcatggatcttgacagtacctctgtgttcctgacagctgtgatgcctggtcacagataccagccaacctcatagttgacccccaaagctaagctagttgccttgagaaggaagatgggaagttcatcctagcttgagtccttaggctgctagtttcccacccagcctcagagcccacctctgtgacctgcatatgcagggggatgcccacttcctcccattttggagaagtgaagggtctataccagtttgacttgagaagtcaagcagcagctcccctcaccctcagccaaaaaacctgctttacaaccccacccaggcagagagactctccacctttatgaatttcagagaattaaatggtctagactgacttgacatgggtgctcaagcagtggctccattcagccaataagccattccagtgactttgcataggcagggagatttccactttcacgcatcttagagaagcatagagcctagacctgtttgacccaggcagtcaaacagccactcaactctgccacaaagcaatcccatggctctaccctgatagggaggtaatcctcaattgtgcatttctaaggggtacagcttctggtatttctcctctcccaggaaattactctgcctaaccttggagcccagcctacagcccggcccaactgcagatctcaaatagcagaattgcccatccagggaatacaacttgcaactggcctgatgagaagccatcacagtttctagccattaactctgcctaatagcagagcccagccactgatctcaccagacagtggagtctatccagcagccccatgtaacatcagaggaaaggcatctgcccagcaaattagagaactcccaacaagctctgactccctgggatcatcaccagctggcccttcccaggctaaactaaatagtgaacctctatccatgccaaagaacacctattgtaaaggctagaagagggggctttctcctcaaatgcatagacaataacacaaggacacaagaactacaaagaacaaaagaaatcccaaaagaaactaataaagcttcagtaatggaccccaaagaaacggagatatttggaatgactgaggaagaatttagaatactactcataaagatgttcagtgatgtacaagaatatatggatagaaaatgtaataaaatttggaaactgatacctaacaaaaataacaagtttgacagaaatagaaacaatataaaagaaacacatataaattctagagttgaggaatacaatgactgaactgaaaaattcaatagaaagcatcattggtggatttgatagagcagaagaaagaatcaatgagctggaagacagcatttgatattatccagttagaggaccagaaagacaaaagagtgaaaaagaatgaagaaagcttatgggacttatgagacaccatcaagagttcaaacctttgcatactaggatttgcaaaagaagaaagagaaaaagggtcacaaagcctatttaaggaaagaatgactgaaaaatcccctaatctgggaatagatgtgaatatccaggtacaagaagcacagaaatttcaatcaaattcaacacacagaggagtacaccaaggcatacaataatctagctgtcaaaaatcaaagacaaaacattttgagaacagcaagagataataaacacatcacatacaaaggagacaatatgactatcagcagatttcccagcagaaacccagtaggccaggagagagtggcataatataattgaaatgccggaggaaaacaaacacaaaaactaccaatcaagaatacttaacccagcaaagctatctttcataattgagaaggaaataatactttctccctcagtttcatgaaacatatgaattgcaaaactcaatggtatatgtaaaatagtgccatattcagaaaactgtaggactgtaataatggtgcataaggcaatttcatccctagtacatgagtyaaaaaacaaaaatattaatagcagctatagctaaaataaattatcaaggtatacacattaaaaatgatgtaaattctgccattaaaaacataatgttgagggggtatgaaaaagtatagaattgttgtatgcaaagttaattgttgtatgcaaagttaagttgttatcagcttatacttgattgtttataagctgttatcagtttatacttgattgtttataagatgttctgtgtaaacctcatggtaatcacaaagcaaaaatctttagtggaaatataaagcaaaaatagaaaggattcaaagcataccactatagaaaaccatcaaatcacaaaggaagacagcaagggaggaagacaaaaaaaawtatttaccaaacatccagaaaaaaactaagaaaatggcaataggccgggcacagtggctcatgcttgtaatcccagcactttgggaggccgaggcaggcggatcacttgaggtcaggagtttgagaccagcctggccaatatggtgagaccctatctctactaaaaatacaaaaattagctgagcgtggtggcatgcacctgtaatcccagctactcggtaggctgagacaggagaatcgcttgaatccaggaggtggaggttgcagtgagccaggatcacaccactgcactccagtctgggtgacagaataagactccatctcaaaaaaaaaaaaaaaaaagaaaaaggaaatggcaatagtacatcctacatatcaataattaccttgcttataaatggattaaatgctctaataaaaagacagttactgaatggattaaaaaacaagacttagctatatactgtatacaaagatacatctcacttttaaggatacacatagatggaagctgaagggatagatagatattccatgcaaattcaaaccaaaagagagtaggggtagctatacatacataagacaaagttgattttaagtcaaaacccataaaatgagacaaaggacattacacaatgatgaaggggtcaatttaccaaaaggatacaacaattataaatatgtttgcatctaacattggagcatctaaatatataaaacaaagataaaaagatctgaagggagaaatagattgcagcacaataacaacaggggacttctatacctcactttcaaaaatggacagattagcaatccagaaaattaataaggaaacactggactgtaacaatacttttgaccaaagggacctcacagacatatattaaaacattccgttcaacagcaacagaatacaaattttccttgaggacacacagaacattcttcagcttagataacaaaataagccccagcaaatttaagatgattcaaattatattaagtatattttctgaccacaatgatatgaaggtagaaatcaataacaggaagaattttggaaaaatttaaaaatacatggaaattgcacaacatgtttctaaaaacaaatgggtcaatgaagaaattaaatgggaaatttaaaaatatattgggaaaaatgaaaatgtaaatacaacatactaagacttacgggatacagcaaaagcagttctatgaggaatgtttatagcaaaaaaaaaatatcaaaaaagagagaaagatctcaaacaacttaatgttacaactcaaggaaataggaaaaagaacaaactaagcctaaagctaggagagaaaaaatacaataaagatcagagcagggataaagaaatagagactagaaaaataatacaaaacattaacaaaattaagggttgatttttgaaaaaataaaattgacagattttagctaacttaagagaaaaggagagaagggtaaaataaataaaatcagaaattaaaagagaagacagtagaactgataccatggaaataccaaagatcataagagactattataaacaattatgcaccaacatataggacaacctaggagaaatggataaattcctagacatataccacctaccaagaagctgaacagaccaataatgagtaagcagattgaattagtaattcttaagatctcccaccaaaggaaagcacagccatggtagtttcacagctgaattatagtaaacatttaaagaactgatatcaatccttctcaaactcttccagaaaaccaaagaggagggaatactttcaaaccctttttatgagtccagcattgctgtgataccaaagccagacagtgatgttaccagaaaagcaaattacaagtcaatattcgtgatgagcatagatgcaaaaatcctcaagaaaatactggaaaaccaaattcaattatacattaaaaggattctctaccatgatcaaatgggatttatccctgagatacacaaaagactcaacatacacaaatcaataaatgtggtacatcacattaacaaaatgaagtataaaaaccatgtgatcatgtcactagatgcaggaaaagcatttgataaaattcaacattcttttattataaaaagtcaccaaattaggtatagaaggaatgtgcctcaacacaataaaaaccatgtaagagaagcctacagctaataatatactcaatggtgaaaaagctgaaagctttttctcttaaaatctgaaacaaggtaaggatgcccattctcaccacttctattcagatagcactagaattcctttccagagcagacagccaagagaaagaaataaaaggcacacaaataggaaaggaagaagtaacattgtgaatgtttgctgacaacacaatgttatatgtagaaaactctacagactccaccaaagagctatttgaactaataaagttgcaggatacaaaatcaacacaaagagcagtagcacttctgtacactaacaatgaactatctgaaaaagaaatcaaaagaacactcctatttccaatagctaccaaaaaaaaaaaaaagataagaaattaggaataaatttaactatgaaggtgaaagacctgtacactgaaaactgtaaaaagaaattaaagaagacaaagaaatggaaagatatcacatgttcttgtattggaagaattaatgttgttaaaatgtacatactaattgatatggtttggatctgtgtccctgttcaaatctcatgttgaattgtaatcctcagtattggagttgggacctggtgggaggtgattagatcatgggggtggtttctcatgaatgggttagcaccatccctctagtgctgttctcgtgaaagagttctcacaagatctagttgtttaaaagtatgcagcacctccaatgggagaacacactaatacactacccaaagtcattgatatggtttggctgcatgtccccacccaaatctcgtctcaaattgtaattcccccatgtcaagggagggacctggtgggggggtgataggatcatgggggaggttttgcccatgctgttctcgtgatagtgagttctcatgagatctgatagtttaaaagtgtgtggcagttctctctctctctctctcctgtcacctggtgaagaaggtgcttccttttcctttgccttctgccatgattgtcagtttcctgaggccttcccagccatctggaactgtgagtcaattaaacctcttttctttataaaataactcagtctcaggtagttctttatagcagtgtgagaatggaccaatatggtgatctatggatttaatgcaatcactatgaaaagtccaatgttacttttcttagaaatagaaaaaataatcttaaaattcatatgaaactacatacaaacacacacacaaaaatcccttaaatagccaaggcaattatgagcagagagagctaagctggaggtatcatactacctgattttaaactatactacctatactacaaagttgtagtaattaaaacagcttggtactggccaaaaaaaaagacccgtcaaccaattgaagggcataatagaaaactcagaaacaaacccatgcatgtatgatcaattgatttttgacaaagggccaaaaacctgcattgggaaaaggatagtctcatcaataagtggttttgggaaaactggatatccacatggagaataatgatattgggcccatatacaaaaatcaacactaaataagtaggcttaatcttaagaccagaaactgtaaatctgacagaagaaaacatagggggaaaatgacatattagtacagttaatgatattttggatttgacaagaggtaacaaacgcaaaaatagataagtgggattacatccactgaaaagcttccacacagcaaaggaaacaattaacagtgtgcagagtcaaactacaatcgggaaaaaaatatttgcaagccagacgtctaataaagggttaatgtctaaaatatataaggagctcaaacaacttaatagcaagaaaacaaaacaaaaaaattaaaacctggggacgggacctgaaaagacatttctcaaaaaaagacacaaatggccaacagatacatgaaaaaatgttcaacatcactaatgattaggtaaatgcaaattaaaaccatgatgagatatcacctcacacctgtcagaatggctatcaaaaaaaagtaaagtgttggcaaggatgtggagaaaagggaacccttgtacactgttggtgggaatgtaaattagtacagccattatgaaaactgtatgatgattcctcaaaaatctaacattagcattatatgaatcagaaataccacttttagatattcacctaaacgatttgaaattcatttgttgaagagatgtctacactacatgttcattgcagcactattcacagtcgccaagttacggactcaacttaagtgtccataaacaaatgaatatgtaaggaaaatgtggtgtattgtatatgcacaacggaatacttttcagctttgcaaaagaaggaaattctgtcactggcaacatcgatggaactggagaacattatgctaagtgaagtaagccaggcacagaaagacaaataccctgtgttctcacttatatgtggactcaaacagttaaactcatagaagcacagtagaatggtggtaagagaagctggaggggtgggaggaatagggagacgatgctcacagggttcaaaatcatacaggagtgatatgttgttggtttgttttttagttctattgcacagcatcgttaatgtagttaacaatggagtattatacatctcaaaatggctaagaaaatgagtatctaatgttctcaccacagaagtatgttaagtatttgaagtgatggatgttaactagcttgatttaatttttccacattgtattcataaatcataacatcactttgtactccaaaaatttatacaattataaattatcaatttacaattttaaaaaatactagaaaatgtttgaaaggcatcaaacttagctatatgatttaatttagatgctagctaagcaataccaagtaaaaatctttactcattttaattcaagatgtattgaatacttactaagtgcaaggaagtatgcagaatgctcatttatttgatactttgttggaaagttaactatattgaatttatctcactcgttttcttttgtcttttaaaggtgagaattctaactcttttagaaactaataacagtttcaattaagttcttgaaaccagattttcagaaaagtttataaacaactatttcagtgtatgacatagcctttcagtataatttggagagcatgatattgttacctgaattacttctctttctactactagtagataataatcttctactagtattaaaacacagaaatgttcttagagagggaaacataagtaactggttagagtgcttcagtaattttgtatctgctactaactaatgcctcgtatttggtcatgtttttatgtgcacaaataaaccaaaagatcacagtgactaaaaatgttttaataactttaggttgtatacatactgaatggctaaaatctccagcataaatgaaaatgaaataaatggctactaataaaatagtatgcctctatcatattcttcagcccaaagcakttttgctgacagcatttattagatatctaagatctacttcagggagggacaaaagagccaaacagtgttttcagagtcagatgcttaaaggacgaaaacctttttttttttttgagacagtctgtctctgttgcagaggctggagtgcagcggcgtgatctcrgcacactgcaacctccacctcccaagttcaagtgattctcctgccttagcctctggagtagctgggattacaggcacctgccaccatgccccagctaatttttgtatctttaggagagatagggtttcaccatgttggtcaggttggtcttgaactcctgacctcaggtgatctgtttgcctcggcctcccaaagtgctggaattacaggcgtgagccactgctcccggccacctttttttttttttaattaaattaagkgcttttcatattttcattttcaaataaaagcaaacccaaacataaataatttgaaataaattactgttcctttgaaaacttmtaattacaacattttgaattcttttaagagaaaatgacttagaattgtatgggtcccattccctatcctttagggcattgattcaatgaacttgctgacaaagaaactacagactatggtattatggcattctcccctaactccttacattgaaaagtattcacatgaaagaaggacttggttatttctattctctctagggttcctaaggacagaatcaggattggtgagtcaaagtgactaggcggcagatttgggctcaacaatatggaaaaactttctawcaggtagaccaggtccaaaatggaataaatctgtgatatcagaaagctgaaacatggacagttttatttgtgggtatataataaattaaytttattgcttcttttgacttgaatcatgaacctctgtttctgcctgagggagcattgcaaaacttctcgaccctatttcaacagatgaccaagaatttaattctcttcatatttattgagcactatcatatgcaaagcattgacataatcttcttgtccccccttcatagaatgcaaattttttgaaatttttatttttaattatggtaatatacatataacataaaatttaccatcttaaccattatattagtccattcttatgttgctataaagaaatatttgagggtaagtaatgtctaaggaaaagaggtttaatttgcttacagttctgtaggctgtaagcatgatatcaacatctgcttggcttcgggtgaaggcctcaggaagcttacaattatggtggaaggtgatggggagccagcatgttttaaacaaccagatctcgtgagaactcactcattgtcaggaggacagcaacaaaccattcaggaaggatctgcccccatgacccaaacacctcccaccagggccaaccttcaaaactggggatgacatttcaacatgagagttggaggagacaaacatccaaactatatcaacggtttttaagttaagtcatgttaggtatattcacattgttgtgcaaccaaactccgaaactttttcctctggcaaaactgaaactctgtacctattaaataacgcctcatttccctgtgccctcagcctctgacagccaccattctactttctgtttctattaattcagttactctagacacttcatgtaagtggaatcatgcagtcttttctgtgactggcttattttacttagcgtaatcttctcaaagtttatgcaggtcatactatgtatcagtttcctttttaaggctggataacattccgttttatgtatataccaaattttctttattccttcatccgctgatggacatttaggttgcttccacctcttggctgttgtggataatgctgctatcaacgtgtgtgtgcaaaaatcttcaattcttttgaatatatacctagacttgggattgctgggccatgtggccattctgctttaaatattttgaggaagtgctatactgtttttcatagcaactgcatcgttttgcattcccaccatcaatgcataagggttccaatttctctacatccttaccaccacttgttatttctgctttttaaaatagtgaccattttaagaggtgtgagaaatattgacataattctgacttcagtgccctgtgcaaaaaactatacataacagctactgaataaaagcttatgattgagatggactgaaacttttggttttcataatgtttgctttataaagttgatcttggatagagattattaatacagtctatgttctgtgcttcaggatgaaataaagacacatcttagaaatagctcttcttacggctgttactatatttcagttttcagcatggatgttgatttttatgtgttattctcataaatacccatcactgtcctagcttagggtcataagccatcatggctttagtaatctgcttctctccttgattctagsaatttttttttaataacacttgggaaagwtagacatgctaattcctctgtaagaagactatttagtataccctggaattaagggttttgaagttcttttttgaaagatttatcgtcaaaaaaaaatctagtttagtatgtctagaattgtgttgtttactttttctctttttgcttcctcccctgcaatgcctacaggctgatatgagatcactggtgctgagagccaagtttacagtgaatgtggtcatgtttaaacttttgctatctttaataaatgcttggtaacctcaatattaatggtctaacaattagcaattctagacctgttgaaaaagagatgttgttgtcatatttgaaaaaaaagtgatttgggaataaataagaaaagagcaggaagttttcatctccaagtaattattcagaagagtgttttcagtagtattttatttgcagtgagtgaaatcagcattctcagagactagtgtttgcaactagaaaacatgtctttctctgaacatgtcagcataataaacagccaggtgctttgtagctacttcccattatatagataatgttgatgtagagcaagattcagtgagttctatgtttaaaataaagagatttcagttaatttattgcttctttgagagcaatataagaaatgtgtaaggtatagttgtcctttacctatgaatcaaaactaagtgccatgaggaacaagtagaacgtcttttaaacttacagaagtaaatgtttgttgaataactacccaagcaagcctacacaaagaggagttggggataatctggtaatactattcctacttaaataatgcccatcatgaccatttcacaataacgttttgttgagtacaagaaaatttctacagaaaaactcttcaggttctcctttttttatttaaaagaaaaaaagacagttgagggtgtggaggtatgaataactaccagatcaaatacatgggaataaccttttttatttggacatttcccctcatacttgcttttagagaaagaaattctttcctgttttaggcctccaagagataaacagagaaagaaaatggctgttcataagaaatccataatatgaacaagtcaaacataaattcagctatcaggaagaagattggcttaaggggagtgttattagcatcaccatccatcctcattagtccaaaagcttacagatcattctttttggatgcagattttgtggagtttttaagatgactacaaactccaatattaattatattttaaagcagataactcattttcttttgaaaaagcaaatagatgtcttttcatgggccaattttatcactagcacctaatatcaatatcaatacttatggacaattgttttttaaaatactttttttaaatggtaatacacttatattttaattgaagctttagtagactatatttcaaatgtgaatagtttccctagttaggagaaatattatactgtaatttactgtaaaactgatggagtcagttttattaaattccctgaaaacaattttctgtatttatattttgagagttgttattccacttctgtatttgtctttaagaaacttagtgtatgtgtgtgtgtatgtgtgtgtgtgtgtgtgtatgtgtgtagttcccaaattttaatctaaacttataatagtttagcctttcaacaagtttttttgtttttattttttagtggtgacattttggaataagaaatttgtgacttattgctctctttgtaaacataatttcacaaataatttagggacttggatcattcagggataccatgtttattggaagaaaagattatattaagtaggtggcagtttaaagaggttgaaattaagttaaaggtaagcatttggaagaatatttggaagcagtagaaattgactaacttagttgtctacacacagccatttctataataaattccatttttttataactctgaaaatcaattctgcattaaattttactatttcggtaaatgatcttcatacagtaacactttgtgatggaccagatgttgctagcttatgtaattaacccaggtgaaaatataagttatgctgttgaaaatctttaaatgtataaaagcaataaagaatagtagtattttagtaacaaagagaaacgtgtaggtttactgcatcttctagcccattctccctgaaaaggtaccatattggagatgttataagctcatgcttgatttaaggtttgaataagttaacagctgggcaatatgttgttttaaagaataaagtctaggcagcaccatttattattagtttaaatttcagtattcaatttattcatcactgcctaataaagaccctacttcctttttcaccagttttactcactgactgatgttctatcactgtctaaaagaagacaaagacagatgtctctgtgcaggcagaagatgctcagtcaggatagctgtgtgatgtctaccaggtttaacaaatttagcaatacaaagcataaaaaagtggactcctgaaaaagatctgctgttaagtaattcaagaatcacaccctcaaagatcctgtttgtagtttttggtaacctggagggcatatcgagtaggcacctattcaacataatgtctaatttgttgacactgaaaaargagttcaagattatactcaatatatttgtataaataaggtagccttattaaactacaagaggccaggaaaaagcaacctaaaaatggaaagccatttagtcaggtcatatatatcagaatagtggaagatcagatcagaagtcagggacagatccaagtctcctgttaaaaactcatcgttggcctcatgttttcttctggatttaataaatggttattagaattgtgattgtgttttatattatttcagtatcagttgcactttaagggaatagcaggaacttcaacaaagtttaaaatttctgtgtattaaaagacacttttaaaaatgaataggggccgggcgcggtggctcacgcttgtaatcccagcactttgggaggccgaggcgggcggatcacgaggtcaggagatcgagaccatcctggctaacacggtgaaaccccgtctctactaaaaatacaaaaaaattagccgggcgtggtagcgggcgcctgtagtcccagctactcgggaggctgaggcaggagaatggcgtgaacccgggaggcggagcttgcagtgagccgagatcgcgccactgcactccagcctgggcgacagagcgagactccgtctcaaaaaaaaaaaaaaaaaaaaaaaaaaatgaataggaagccggccgggcgtggtggctcatgcctgtaatcccagcactttgtggggccgaggcgggcggatcacgaggtcaggagatcgagaccatcctggctaacacggtgaaaccccgtctctactaaaaatacaaaaaaaaattagcagggcgtggtggcggacgcctgtagtcccagctactcgggaggctgaggcaggagaatggcatgaacccgggaggcggagcttgcagtgagccaagatcgccccactgcactccagcctgggtgacagagtgagactccatctcaaaataataataataataataataataataataataggaagccacagattcagagaaaatattgacaacacatatatttgataaaagatttgtatctagaatcttaccattcaaaaataagacaatgttttaagtgaacaaaatacttgaccagacattcatgagaagacaaattggggccaataaacacagagaaaatattcaaatcatattcagggcaatacaaattaaaccactatgagataacactcactagattgacatttaaaaaaaaaatgaaaaaaccagatgttagcaaggatgtagggaaccaggactgtcaaacacaagtcactggttggagtgaaaatgtgacaagcaatttgacagtctttataaagttaaacacatacatattctttatgacccatcatgcccagatatttatgatacccaagtttttatcgaagatatgaaaacatttgttcacaaaaagatctgcacatgtgcatcatagcagttcataatagccaaacactggaagcaacccaaatttactttaataggataataagtaaacaattattggaaatgtttatggaatgtattggaaatgtttatggagtactagttagtaataaaaagatacaaactactgacactacagtaatttctgtgaatctcaaaaatactttgtgttgagtgaagaagcctgacattaaaaagaacatagtgcatgattctatttatttgaattgttagaagtagcaactaatctatgatgatagaaagcagaacagtggttgtgggagggggtggtggcagtggcagggaggagggatgttagagattatgtggaaagtggtacaaaggaactttatgagatgacaaaaaaacattctaggaggttgggttagacaggtgtatccatctgtcaaatcttgttgaactatatacactcgagatacagctgattacactataaattatatctcaaaggaaaaaaagttttaaaaatgtttcaaagcagcaaaacctgattagaattccaaaatattggagaagaagaaacacttctaaattcaatctgtaaggcaagtattaccctgataccaaagctaggcaaacacagtataagaattgatagtagaatggcaagtatgactatagtgataaaagtagatatatcaggaatggtagagtgttttcagcatattactaaaaactaaagagatcatttatatcaaggtttgtctaaggaaggtactgtgtgtgcagcagcattctagaagcagaatcagatgatttcttaagatcctctcctattctttcctattaggattctattattatgagtgcttattatgtctcaggggctgtactgaatcctgtatgttcatttttttcattcttagaccatttccagagaasatgaaagtttaaaatgtgattgctcttttgaaatagtagtatcaacattttattgttgacaaagttaaaatataacaatagtaacaagtgtttatttggcccatccttgtatacactctaatatgttaactctaaaccttcacaacaaccctacaaggtagttactatggttaggcccatttttaaattgaggagtcacagtcacaagctaaaaagtgccagagccaaaattccagccctggagtttcacttcagataaccatgcatttaactgctatgccattcttacccaccattacattcttaaccttaacaagtccttacaatttaataatgttatttatttgctgatatttaaatgaattaaaattaatggaagaattacaatatttaatatgatactagatttttaaatatattgaaaacctcaatatgaataaaatgcaaaaattattagcatttatagtaaacaaaacacaaaacatctctatctgtctaaacaaagcttttgtctaccccgactgttggggctaagtgcctgtgttaccctatgaactgcccttggtttgatttctaatcataccaccattgtgtgatagatatcaggataaagctgaaatgccaggtcagactccagattttctggttagattttcagttttacttttggctgttttgaccatgttttatgatgggtacctagtcaacataagtaactcattaggatcagctctactttttaatgctgttgatataacatcagtctttctggcttaaaatttcttataaaatttttgaatgagtattttgcatatataactgtgttttaaagttatactgtaaacacttgtatttcttcataactttaagtactttggtccaactctttatctgcagagtttgaaatattaatgaatttcatcaaaatatataattagttgataaactgtgagtgctcttggtatgttaycatcatacaaataactatacattatagtataatcccgtttcagttatctattgctgtgtaaaaatgacctcaaactcagtaactaaaacaagcagctcataatttttttaggtcagagatttggataaggtacaaattggatggttcataatgttctgcaatatctgggaccttagttggggctcctcaaatggttaggagctgcctagaatactccgtggatgtttcaacccgtagggtcatatgtctcaagccttgactctgcctgttggaccaaatgcttagttctccatgtgtggcttttccatgtgctacctttggttttttcacaacatggtggtctcggtttctaagaagacatattcctaaagtatcaactctaatgtcctagcagttatcaagcctcttcttatttttttttttcactcaccaccatactaataaggatcaagcctcttcttgcatcagaatttttttgtgtggccaaatcagatatatatatatataaaaccaatcttctctattatagagttatgttttttcttagcaggtatctcatggtcaggcctagagtcaatgtgggaagagactatacaagggtatgaatcacttgtacacttatacttatgtgtaagtgatggttcactggaaaccaccaatgtaccaaaacagttgactaaacatgcttagcacacttctgtgttcatatcaggtactctgtacttagtgattgatttaaaaatcaaggacatttttatatatgctttttctatttatgtgaattgttacattttgmcacattaacctttaatatatgaataaagttaaaacaatgaagagacttgagtaagtactgtttctaatggatatcctagaactgaggtccttctatgtgcttccattaacagcaacrtaataccaggtctcaactgccattgtgctgccttacattatacttccatgtaatagttgcattgctataggaatataggttactaaactatcattctcattactttccaaagaaatgttcaatatcatgctatttaaagactaaatatgataacgattttaatacaatgtcattcttctaatgttacatagatacatgtatttatcctgtgcatcttggtatgaggatttaaaaatccattttaggggaaagttttgtgtgcagagcacagagcgctagatatcaagtaggtttatgtaaatagtatattgcttcatgttgttggtgccatataacagaatcctttctgctaatttaagtcacaaatgaatatatcaaaatgatatcagcaaacccacggaatgtacgggaaggccaaagagccaggctgagtcaggatgcaaggcactgcctacctgacaatgtaactactaggaatctgcctctgcagttgctgacacagccacactgcatatttatggactccatgctactatggccagcgcaaataatcttttatcttattaaaaataatttaggcatatcaggaagtaaatataatatacccttcctcaaaaamaaacaaaaccctagaagaaaacactcatatacttatcacttggattaaacaatgattgatagtttgctgtatttgcattaaaatacttcaacacagaaataaattacagaagtcatgttttaccactaaaaatatgaatatgaataccttaaaatggaaaaacttatataaccatactaaaattcatatatgtaatgaattaataattccctaataatcatctaatacccagcccatattcaaattttcccaggtgtttgcaaaatgttttttatagcttgtctgtatatgtccagatccagtcaaggtttacatgttgaatwttttttagtctcttgagttttgctttagaccattcaagctactttaacaaaataccatcaactgggtggcttataaacaagaaaagagaaatttctttctctcagttcttgaggctgagaagtccaagatcaaggcattagcagatttggtgtctcgtgagggcctatttcctggttcatagatggccatcttctcattgtgtcctcatgtggtggacaggataagaaacctttctgggattttttataagagcattaaacccatttgtgagggcttcaccctcaggacctactcaccttccaaagtccccacctccaaataccatcacactgggaattaagtttcaacatatgaatatgggaaggacaaaaatattcagtatctcctacccttttaatttttctcatacctttgacttgataaagttgggctagttgtcctgtatagaatgactcacgttctggacttgttagatttttttctatgtagcatcatgtaacttgttcctctatcatctgtattttctgctacctataagttagatttaaaagcttggttcagattaaacattcttgggatgggtgatactgtgatgggcgacactgcttacagtgttaaattaagggtttgtatgatgtctacttacctctcttttactcaagactaataaaatacattcaggtattttgtttcttttctctcctcctctgttctcccctactctgccctccccacctttcctctcccctacaccctccctttccctgtgctcttcccatcccctctcctcctctcccctcctcttgttcttctttacaacaggatatcactctgtttcccaagccggaatgcagtggtgtgatcatagctcactggattcttgaactcctgggctcaagtgatccttccacgtcagcctcccgagtagctatgactatgggaacgcaccatcatgccttgctactttttaaattttttgccactcctcactatgttgcccaggctggtctcaaactcctggcttcaagtgatcctcccactttggcctccaagagtgctggggttacaggcatgagacactgcattcagcccttctctaatttagagttatgcttttcttagcagatattctatgaagtaatactttgatatcacatgaatatatagtttcccatcaatcctttatgtaaaaattttgccatccattggtgattcttgtcctgaatcagttacttcagtaggagttgcaaaataattattttctgtcgttccatttatatttattatcttgcattcatctataaagaaaagctttcactcatcaactgaggctttgattattttgagatatgcttcctgtagaaaagcctgcataattcttatttttttattaccaattttttataataacaattgcgatagtcacctctaagggtggcaaatgaggttttcttatttgtatatctggctttatcttttatgagtattatttatgcctcgtggatttttatattttcaatatgattacataaatgatagccattattctttttgaaagtcaaatcatctcaacttcggcctcttttacttttccaatatttcaagatttagagtcctgggcaagagcacctccttggctctgccaaggtcatctatgcatgccctggctggcaagtgaataagataagatctttccaggtcatgggtttctgaagtgggtggcagttttgccttcaaactaccttgggattcttttaaaatacagaggctatttgggtgctgcttggcccaaacaacaaatgctcccactacagtattagagcctctgaatttatattttctaatatcttcctttagagcctgaaaagttaatttcccagatgtcacctacccatatgttaatatgttttatggcataattagtgttatttgttataaatttccgaattaggataagtagtatttttacttaagttgtttttagtaggtctcaggtattgtggattaatcctaatccttggttcacaatgcatttcgtcactaagaaatacatttttagaaaaattttaagtgacaaataataattgtgtatacttayggggtacaatgtgaggttttaatatatgtatatattgtggtatgattaaatcaagctaattaacatatccatcacctcatatccttgttttatggtgagaacatttgaaatttactctcagcaattttgacatatacaatgcattattattaaccatggtcatcatgttgtgcagtagatctcaaaaatgtatgcctcctatataattgaaatgttgatcaaagagaaaaatgtttaagattatttttgaaatagttattccacaaatatttattatgcatcaactgtgtatctggtacaaaatacagtgcaacatgctaagggcattaaaaaaaaaaaacttggggtaacagcaaacatagaaaagtattactttgtttggctgaatagactacattaacatttacagtgagacaggatgtggcccttggttgttaaatattcagggaataaataacctcagaaagactgtgatttcatcaaactcacacaaataactagtggagtgagcccaaatggcccacttctcagtctttttctaagaattgtgtgttcagttttggaagaattattttgaagttccatagtagaagttagttagtattcacctataagtgttctgtggtataaatatataaagggaaagaaaggatattcatgatatagcataggatttgacataattttgcctaatttatatagattggtatgacataaagtaggactttgggaatggatgtgattggaaacggtgatgtcaaataggggaatttaaatgattgaatcattggttaattttgttattgggataaacttgagagtaaatttgccttatttttagagggaagatggtttaatttttggtttaagggctaaatctctcgattttttactttataatgttaaagttttattcataaagctacgcattactggtaattattctgggctctaacagccaacaaatgagcaaagaagagtcacgttgggcatatttttcaggatgtgatgaatctgtctagtcatatatataaacattatcttcttgaaatattaatgttaaaataacagtacatcttgaatcatcttttaatggctctgcttattttgaagtcttccagccacatctgtcatatggtgtgccttacaagaaaatgaatctggttttaaaatgtttagaactcagaataagtcattttaaccaaagcatattagaaagccttagttaaaataattacaaatgtacataacagagattttacaagtcactggaacttgagaacccgtctgtcaaggagattttttaattagaggcttggttttcatatctataaagcagatgataagcccatgacctgcccactctctgagactccagttagattatatgtgtacacatactttgctgatatgatttgaacgtatgattcagaaaccaaagctggtgatttttctccccaaatcatcacattaacttgtaggactcccagaagtacagttcccaattggtaattgacaagagagatcactggttgattcttttctaaatatggcatatagtacctagcaggaaaaaaataccaggaaagtactaggctataagaataactgtattgatgacttatgttttacctaaggcttaagatgtgacaaagcagtacactgtacttctctagttttttagggtagaaggttatgttattgatttaaaatccttcttcttttttaacataggcatttacttacaggtataaatttccctctaagtatgttttagctgcatcctgtaagttttagtatgttgggctgtcatttcattcaactcagagtaccttgatttccccgtgagttcttctttgatccattggttgtttaggaatatgttgttaatttccacgtatttgtgaatttcccaaatttctctctattattgacttctaatttcattccatgtggttggagaacatcatatgatttcaatgctttaaatatattgaggcccattttatgtgttagaatattgtcaatcttgagaccgtttcatatgcatttgagaagaatgtatattctgttctcatcagataaagtgttctatagattagagcccacacctttgatcactcactacaaggtatgaggaggaatgtaggaaaaatgtatgacacttttgctttgacattttctacgtgaatatgtataaacatttcacacacctgaggattatggatatatataatttagcagctcctagcaaaaagggaagcaatttgggttagttttaagaatgttcaaaagaaaagagaatcaagatttgttcaaactcccaacaccattgtggatattcctccttttcacatataagaaagcaacctcaggaagttttgtataaatttttccaatgtcacacagctagtgcggtgttgagccaggactttaacccatattctggttgcaaagcttatgatcttcccttgcaggacttagaaataggaggatataactgatgcttgcttttggtattattatattattgttggttttactgtatattgatatattgtaaagttttatgatagatattacagtgtgaatttttactttaacaagaataagtttctattttatcgacacacttttcaagtagatgttgagatctcctaataaagccgtcagtgcttctttgttaacttattcctaacaactagcataacggagccaatcagaatctgaaccatgcggtaagactgcagtgagtctaagtttgtagagtaagtcagaggtcctggcaaagaaagccttgttaggcattaggacaagcctcctgtgagttataaggaattgccttgcaaattgatggaacatgagaaagtaatatcagccatgatattccagcactttttaagaagacctgacctcatgtgtgaagtctgagccatagtccactgaaagacatagcagaccccacctagggtacctaagcatagtgagggttggaggttacttttaattcacaacattagggcttatctctaacactaacatcttctttcccagagctaggaaggctcctcaaaggaagaaggggaatacaacttcaagagataaatccagaacccatttgttgtcaatctttgttgtgtttggggggggggctgttgttgttgttgttgttgtttatattagctttagatactgacatatcacataccagatttatttccttttgaactacaatagtattgtgctgcagattctgaataaatgtaaaatcagagtggagtatcagccacaaagctaatagcaatacattgaaaattcatcaagaaattgccaagattctagaagactacattcttcacccagaatataccatccccatctaacccacatataagaaaagtcgttctgaaaactctatgctaactgcaacaatgaaagaacatttagcttataaaggggcacctgtgttcctctggcccctggaaaatacctgagtttgtttattattgaatttacctgaaagcaaaactttcttaagtatttcctagtcgcctcttaagtttttagtgtttccaatgataaatattgaagtttgatcaaatgtaaagtaactaattctgtttatctcctaagtttgttttcaaagctaagaaaatattaataaagtctcagacttacatacgtaacattgttcttgttctattggttctcagagtgttgtccccaaagcagcattctgtttctcaaggtgtaggccccaccccaaacccacagaatcagaaactctgggagtaaagaccagcaatctgtgttttaacaagccttcaggtgattctgatatcagctaacgttttggaattactgcttaaactatattccattgaaactgctttcaacctgaccctattttcttaagtggtcttcaagttcatatagccaataaaactttttttttgtattgagtgtgaaatatatcaatttttgtttcctcaggtgtattttttgtagttctagttgtcgtatagcatgtttcacgtaagctgaagcgttgcctcattgccttgctgtttcttaccttatcatctttgcatatacccttccctctgtcaaatttccacaccattgcctctcttcaatttcccacttgtaaaaataacatccctttagaatttgatgtgaggattcaatgagaaggtatatgtgtatgtacacatacttggaacaggacttggaacatttttggaatagaggaaaagaaagccatgtgaaattctaattaattactttatcaattacaatttttaataaatttacttcataaaagaaaattttggtttattcataaaattaagggcaaatactgaaacttgccatgtatctcattttggtttaatgaagaacagtagaggtatatgtaggccagctgttcaccgtattctataaaatggtagttttcatgcatgaagcatgaatcaaacctaagttaagaacccacataaatataaataaagcatcttttctatttgggctgaactactttggattttatattagctaaattaaaaatatgtttttattaggtgcaagcagtttccaaagtgcttttcctggctcacatcttgtccttattttcttgaagggtcggtctagcacagttcaagcaagttttctggtcctgtttgtctgccaggtggtaacagagtaggaaacccacagagaggttaagtctatgaagccttatggaaaagaaaaactgaccttttctacagcagtgacctaggaatgagtcagctcttgcatccagtcactagtgactctgaggataaagcttattttcagctaaatgccaattagggtttcagaggcagagaatgtgcagattcatgtagagcaaatctttaagccactataataggtgagagtttttacaaaagtcaagaaacacagatgatgwcccctgctgtggctttgtgtctattgtatccaaaaagcttttataccatattatgtgttttatgtgtctagatggctagagaggaaagaaaactcagtttgggatttttttttccccttaaagtaggagctttcttgttacagttggaaaaatacaaaaacttcccttttctctccttactgattccttgcctctgcctatcccctgcccccatggctcttaggatggggaaaaaaaactaaaaaatgagagtgaaaaggtattaattccccaaaaacacccttgtagtggcatagtggccatatgcaagagctgaataattcccagaacagaagcatatatcagtgtagttcccaaaatgttgaattttgggaggtgatatcaaatttgagcaaaatgtttttgagtgatttggacttgcagttttattaaattcatacagccagtttattcctcatcatggttaataaaattgccatggaaatattaagaaacctttttaaaagtctcaatgctgtcattgtagttatagatgtgttacttagtacaaattgaaatacaccctgtggtaaaatttattctgcaaaaataaaaaatctgtgttgcataagcattcaaatatgtcacactttttgttcttaacgtaatatagtcactccaaaatatttgagattttgcatgagatcatggtagaaatcaaaatgttttaacaagtggattcttaaattggttaaaaaaaaaaaaaaaaatacatgatccattaagtgtcttgaacactggagtatttttatttgattaaatttaactttacaatgatgatttcttttaattttagaaatgagcacagaaagaatgatgaatcataatgtctaccaaatttgttcaaggaaaattatttgaaatattcccctcaaaaaagaaacttctttttttctaaacagaaataaatttttctttataaccagaattaatagtttattaaatcattaagtcatgtgatattgcattctacagagctagccattgttttcattttggtaaaccaccttgcaaatctttgtttttgtttggtggcatgtacacatatattcacaaacatacaattttatataaactgaataattatttgcttttattatatttataaacagtgttgtcatgaacacccattacattcttcttttgtgcttgacaaggagcttgagcactttgggattcttatgataagtatatagaattgctgagtggaagggtacacacatttagcaatgatacattttgccagtgcttgagagaactgaattgtttttcatacctttaaaaaaaatcccatgatattataataacaaaaaattgcagctttaggcaatctcaaagaatgattagcactaccaacaatttagtttggtttaatgtatttattgagtattgaatgctgattttatgtcagatttggtgctaattattggagttgcaaaagtgaaatgaatacagttttattggactactggagattacaaagaaaataaacagcctgctaaaatacaatatgataagcttgatggtaaggataatatagggagcttgtgcatcagtattgagagtccagtaaagtctttatggaraacatggcatggaagctatgatctgaaggatgactatgagttatgagcagaagggaagtggaagagagaggagtgttttaggtcatgaggaatagatgttaaagattatattatacattctgagaactaacaggattttaggatgtgggaatgcatgcaaaaagtgaggcaagagataaagatggagaatgaagcagagctgagaccatgaagaaccttgcagtcttaaggagtttggactttgagaattaagggtcactgtagcattgaagtgatgagatcaaatttctcatcactttaaatattgtttaaaatattgttctggctctagtttgggcagggacttcyaggcaagcaaatcacagagccccaaggccaaaaagatgtgatacacttgatttgggcaggcatctgtaccaaaagagtccaagcctatcagttagacaaggcagtaagaaaaggcaaattttaaggtcaggtgagcaaaagcactgtttatctaattgctcttctgtcttgaaaaagcaagcaaaatacttcctgggagacttggaaacttcaacccatgcagtgaggaaagagcctggatttagaatttgaaaaatgcatcataacaatartatcatcatcaacatcatactgtgttgttattatcaggaaggccacatttaggtatacttgattatagacctaaggtaaggataaatatagggagcttgtgcatcagtattgagagttcagaaaagtctttgcagagaatatggcatggaagctgagatctgaaggatgactttgagttatgaggagaagggaagtggaagagagaggagtgctttaggaggaatagatgtgactcaaacagaatgactcattttatgycttattcttgaatagatgctcatgatagatctctcatgcataactggttcaggacccaggtggaatgggcttgcatgggaaggaggcacttcaatgtctgtacctgcactgkatgagagaggcagggccaaaagttcctaaacgtgaaaagcttcagtaattcaagaggatcacttatatgcagcttcatttgtgaaacgctttgtaaagctttatgatatcctagaagccattttatataattttgatacatgccgatgaaagtctagatgaatgccagagaaacttccacctcatttttttcttatttaatctataccatgtactatatttaaatcatttgtccatatattcatttttttacataatgttgaaagtgttttgatgtcggtaaagcaaatttaacaaggcaagaacactataggaaatgggaaatcttaaagaatttacataatgcttatctgttaccaagtatggctttcacaaaaatgacctcatcctctttaaatcctgatcgacatcattctatctgatgctcttatctcagtgatttttattctgtgtgctatattttagacgtctgtcttcacaacaaaatttctcctcttcccaaacccccacatttccctctgatgggtcccagattagtattctgtactctttctcccttagtgtatgcctatatttatttagcaccaacaacatactgagtcacagtgttggatactgtgataaatgtggttcattaatatttttcctaatgacttcagtttttcatgaaaatgatgcctactcagtataaaaaattaaggcaatagagcagaaagaaaagaaaatagaaacccaaaataacaacacacctaaaaatattctgtgaacacggaaggtgtacaaaaggaatgcataagcttttcgttttgttttgtttcgttcacttagaagcattattttaaaaatagccaaagaaagaaagcttttttccaaggacagtaaaggtcagtcaattaaaggaagtctattaatgtaatatagcatattaataaattgaacaatagtatttcaatttttaaaatacatcaattaagtaacaaaacaacattccttctaataaaaatattaaatataaataggtcttctctgtgataaatagtagttccttttctaaaccaaaattcaaagtattatagcaatagacccttctctcttaaattaaggtagtgtatatcttcttttaagaaatgtctattcctatcctttgcccattttcaaataggattattgggtttttttattgttgtttgaattctttgtattttctggatattagctccttgtcaggtgagtagtatgcaaatattttctcccattcaacaggttgtctgttcacctagttatttcctttgctttgcagaagctttttagtttaatatagtcccatttgtctatttttgttttagttgttctgtgcttttgaggtcttagatgtaaaaatctttgccctaaaccaatgtcctgaggtgttttctctatgttttcttttagtagttttatagttttaggtcttatgtttaagtctttaatccatcttgagttgatctttgtatatggttagagataggggtctagttttattcttctgcatgttttctcagcactatttctggaagagggtattcttgtcccagtgtatgttcttggtgcttttgttgaaaatcagttgactgtaaatatgtgtgataattcacatgttttgtcaatttatggtgtctcaagtgtcatgaaggctttgctcatttaaaaattctttttccttgatatttgtctgaccaggttatttcaaaagatctgtattcaagttctgagattctttcttctgcttgatctagtctattgttgatgctttttttttttttttttttttttttgagacagagtcttgctctattgcccaggctggagtgcagtggcacaatctcagctcactgcaacctctgcctcctgggttcaagttattctcctgcctcagtgtcctgagtggctgggattacaggcatgtgccaccatgcctggctaatttttgtatttttagtagagatggggcttcaccatgttggacaggctggtctcgaactcctgacctcgttcgtgatcctcctgcctcagcctcccaaagtgctgggattacaggcatgagccaccgygcccagccgatgcttttttttgtttgttttttagacagtcttgccctgtcacccaggatggagtgcagtggcacaatcctggttcattgcaaccttcacctcccaagttgaagcgattcttctgcctcagcctcctgagtagctggagttacagacacgcaccaccatgcctgtgattgttaaaatctctatttctaggttcctgagaccagtaactcagagtgttcaactatcagttccaatgcttattgctctggttttcagtccccctcctcattttccaaaccctggatattgcccttgatttctagtgagctaaacatatgtatttaaaggtgtttttaaaaatgtactctattcagcacttctatgtgttgagtcacaagagagttttcaggttatctagtatactgccttactagaaatggaagtcaaatttgtttttcatgttgaattaatatcatttgtaaagttggattgtgaaatagacatttggctaaagactgggtttctgccacagcaaatgtactccacttctgtgaaatcttggctaagccaagtttttgttatgaaataacatatttgattctgagatttttacttggtgcttagacagaatagcaatatcacctactgatattattggcactttatgattttgtttaagatacactgtttagtgtgttttgaaaaaaagaataaaattttctaagatttgaaagagatcttacaaagattaggggtcatctacattagacttctaatcttttcattraaaatacatatgatctttcatatggaaggagtaagattgtaagtttaaaggctatatacaagtgtgtttagatttctccttttctttctaaattacaatatatttaaagatatggatatagtctttttattcgtaagtaatggtgtagcagattataaagggcacatagaacattagctctcagattaaatgttatcttttgatagatacctttcaggatcacttagactaaaataaggtaggttctctgttagcctccctcatagaatttctaagtatgtatgcatttctttgttgactcgcttattccttaccttttcagctaggttataatgaaagaaaataagcaattcactttgaagcatttagtgaccagagttaggatatgggaattttgtaatttttagtttttttaaaactgttacatttctcacttgcatagcatatatttaatctaagcagtgccccaaacacaaaaactaatcactgtgcttttgaaatctgtatctccatggaaacaatggaaaaacttgcctttttaatctcttttgttagactgagatctcattttgtcattaatagattctgtaaatagcaagaataggaatagtggtagtggtggaggtgaaagcaataataataagagaagcaaatttctgtttagtactatcttgggccaagtactatgctaagtatgctaaataatttccatagaatcttagttctttcttacaacaaccttactattcttttcatttctaggtgagtgaactgaggcttacattggttaacttagttgtccaatgcggtactgctagtaataggtagaacagagcttcgaacacagagtggagttttattgactaacttttgttagatatttgcatgatataagtatacattttcaaaatgtgtgtataaactacagtacattttggcactttttgaaatatggtgaacctacatctctgctacagctgatgatactgtaagtctaaaaattgtatgaaacatctataattttaatacatatgatgggcttttattacagctattttatgattttatcaacagccaagctgctgtttcactacaaacagattggatatctttgtgattaaagcagcaggctaaagaccatgaagggtatactgtttggttttcaatcatttccatgtgttatgaattcttatcagatgttgggaaatagcaggcttaaactaactgcaagtgctacatccgtggtccaagaaacaatagtctgtaatgggcatgtgtttagccatcagcttgtttaacaaggcctctaagcaagttcatttaccatcatatataagaaactaacacatattccatttatgtagatttaagatctctccaacagcatgtcactcaggtcttgataatcttcatcaattttttaaatgtgaatattagagaagatcagtgcttgacttcatcacccttatattaaaataatatttctcgtgacataagaaaaaataatagatataactaraagttttcctaaggcacattcctagaaactggagaaaatgaaaaaagcatctgggaaaaaataaaaactagactgacagttatgcaagatacttgacatttccattttaaatcctcaatckcatgttcaaaagctgcacagttaaaaaataattgcaggattttaaaaaactacttcaatcaagtaataacgaatgatcttataaaaattgtaaatatgttgacattgtagtaataaaaattttcttatgtagttatttatttatagtatctcctgttgtatagaagatattcagcttaaatccctctactggatattatttaaagaaaaggaaattgttatatcaaagggatacctatacccccatgtttattgcagcactattcacaatagccaagatgtggagtcgaccttagagtccatcattggatgaatggaaaaagaaactgtggtgtacatacacaatggaatattacttggccataaaaggatgaaatcctatcatttgcagcaacgtggaaggaacaagaggtcactgtgttaagtgaaataagccaagcatagaaagacaaatatcgtatattctcagtcatatgtaggagctaaaaaccttgatctcatggaggtagaatgcagaatgatagataccagaggcatctgggtttgtgtgttgggggggatgaagagagattgggtaatgagtataaacagttgaatagaaagaataagctccatcctcaatagcagagtaggttgacatagttaacaataatggattgtatacttcaaaacagctagaagggaggacttgaaatttacacaacacagaaatgttaagtgcttgaggtgatagatacccttaatatcctgactttaccattacgtattctatagctgtaacaaaataccacatgtagcccataaaaatgtacacatattagaaatcaataaaaattgtaaataaataaaatattcagtttaaaggtaaggtatgagtctaaaagtacttttcacttattaggtggttagcaggttgagtgaaaactgcatgaagaattaagatgtcagtgtcatgttgataattctattattttcttggataattttgaaaaatctcttgccatctctatacttcagcttttttgtgtctaggatgaagacgtcaacactcagcatctcgctgcttccttagtgatgtgaatgaaaaccaaggaaataattttaattcaaaatgtgctttaaaatgccaaatcaaaaggaattaaaatgatctgcgtggtataactttttacacttataattttgattatgcattttagaaacattattttttgccttacttaaactatttttctgtgatgatgaaactgaggcaaagaaggagaattaattgccttttcatggccaaataatgctgtttagtctaggtcttttggtaaacacatttcttcccaagacccccacccaaatactttgtctaatcatttggaatgctataagttgacattagttttaaatgaagaaaacaactcatcactggcattagagtagatatctttagcattaataattagtgtcattttatcattaattttcacagttttaattctttaaattgctaatgtaatttaacagtcatgagttggttgtagtatattttgaatataaaaataaatgccttctaagcaccaggtagtcagcactgtcctgggttacagattaaaaaaaaaaaaaaaaaaagcacctgttagtgtgcctactcatattaatcctaaatctttgcatcagttttgcatattatatatgttgaatatagacacaatgtatagatgagaaaactgaggatcaatgaggttgacaattttccaaagctatactcaagtgccactttttccatgaaggcttaaaagatgtggaagattttagtagacagaaataggggaaaaacaccattttaagtagtggaaatggcatgaacaaaggagtatgtgtactgaatctcaaagtttgccatggtaattatgactagtatgttttgactgaaatttagagtaactgtagaggatatgtgggggataaagttgaaaaaaagtagtttgaagttaggtcatgagagagacttaattacttaagaaagaaattagtgcataattcaataggatttaaggagctgtgaagatcaggggagtagaactgtaggatttggggtatgtgttataaaatgaatggaagaaaggtcagactggaggcacgtagaccaagtaggagactgttaaccaagtgaagtcctgatggcccaaactagattgctgtcactaaccatagaaaggaaaagactttataaaggaaaaaggaaagatgtagtaagtaagcgagtgataactagaaggtgggcttgacaaccagcattgtggtagctttatcagaaatagaaaagagaggaattagttggtgttcgttgaggagctaacattatcaatctcacttttaaaatggtaaatttgatgcatttgtggtatgtctagtggaatttttcatctggcagttagaaatgtcaatttaatcttgaaagtggaaataggtaaaagataggctaataatcttgattttatatgttgggtgcattaagacagagagaattgcagtcctgagtgttgatgaaatttatagagaggaaaagaaggttgagaagcatctaattttgaggagcagaaggtagaaaagtagaaccagtggaagcagagaaagaatatcaaagaggtaggataagatcctaagtgtcctaagacactcatgacactatttctgaaatagcagaggggcaaagtggggtaagatgttcaacaaagttggattcttttcaaggtctaagttacaatctaaccagaagccattgaaatttgtgattagggggtcataagttacttttgagagagccatttaaggagtgtgtggattacaagtcaggtattaaaatgggtggatagtgggttaaatgaagacactaagaacagttgagaaatcggttgcaaaaaaaaaaaatggaaaagccaaaggtgtgaaaaaattgagggaaaatattgtcactttactcacaaatgcttggcatttatactttaccccagatccttttctcagctctatctttcattactagttaccttgccccactttaaattattttatacaatagccaaataccttcatgttttagcatgtaccctgtttttccacctctctttcttggtttagacacactgcttggatgcgtcttcattctgtctgtaaatagctaattcctacttatcacttatctttcacatcacagttcrcatgcttcctctgtgaggccatctcttatttgtcctgcagtactcttttcttcactgaatttcaaaatgcttcaatcatttatttgtcatggaagttgctgctttttattatgtactgtttttattattgatgtacatggcttatatccctccttggaatttaggctccttgaacattttctcaaggtgtccatgaaacaacatggaaagagcatagacctggagttcagatagtcacatttttaatttctagctctgtcacttactcactatgtgacttctaaaaaggtgtttattttatcttcataaacgtcagcctttttacctataaaatgcctatatcacagctcattaaaaagattattgagggatagaggaggtaactgatttacagaacctagcaaagtgaggttcccttccttaatcattttgatttctgtgccagtacccagaatgttaccatataaatattaagtgctccagaaattgctaaatgaattagtaatttctttgccaatactaaatgtataaagctactgtaatttctaggctgctgatattttattgggtttttttttaagaaattcttttttccattagggagtaacttattgcagatttactagataaaaaatatattcaatacagaaatatctggtggataaatgctgatgtcatacaaagcatattaaaattcaaatgaaatataactgtgaggaaaacaataagtggcttagagttagtaacagtttataaaagccattttttttttttttttttttaccatttaagcagagactaggctttgaggaggccaagacaatgctttctggactctaaagtaagcccatagtttggcagtatatggtgacatatactccaagcttacaattttaattctcatttgaacatatttaaatatattctgatgccagtggataggatgatattccaaagaatgtaagattgggaatcctaaatttagactgtgatctaaaaattggtttaaaaacttgcacttcgtttcaagagttatggattccacagtactaacaaatggtgttgcttgaatggtctcaaagattttgacaacattgtaaatcttcaatcacttgaaacatttagcataatgaagcaatttttaataatctgtatagacctacccttctctgtctcaccttgtcatttttgagtttttattcatcattgctcagtttgtatatgatatgactacattaatatagtgtgtctaaatctttgactatttaaggatagatttttagaagcaagcattgtgcattcattgccctcttaaaatgatgaacagagttgtttgctgtatatagtagaaataacattcatttataataaataataaagaactatgcccatatgacagacagctcttaacagtggtgctattttaaatagaggacctaaatcataatagctactgtttgttgaacatgtcttgtgtgctcaatattttacataacttacccctaatttatagttgaataaactgagtctcagagaagttaagtaactattctcaggtcacctggctaataagtgatagagttggcttttaaatcaatactttctgaatccaaagttaagtcttataatagctatgttctactccctctacaatagtatcgtaaacagtctatactttctttgcctcattctttgtgtacttcaaattattctcataactagtttgtctaccctagaaatgcaccatttcctcttcaactctcaaaataatctctacctcaaagaccttagtgttcggaaaacatcatctaaatgactgaattacttaccaaattgaaagctatacaaagtagcataataaaaagataggaatgtttgatggagtaaatggaagatgtgtttgctgttccctgtgcagcggctacccagttccatttttatgtcatgccaagtaaatatgggatatctacagttgtgttcatatagctttaagaaataggaaataattgtacttacctgagaacacataatgacagcctaaactaggcattgatggttaaagtcaagaggagctgttatatgtgagagagattagaaaatgatgtacttcaacactgattcaatgaaaggaaagggagaagagtccaagggaaatttaaagtctggtcattcaaaagattatggttccatgatcaaatagagacttcaggagaaggaacaaatttgggcaagaaggagacgatttcaggtttggacataaagaatttgtaattatgttgagatgtccagcctgctgtttctctagagttgagtccttgaaatgaggctagtctcaattgagatttgctataagtgtaaaatgcacactgtattttgaagacttagtacaaaagagagtgttgaatatcacattaatattctctatattggttttatgttaaattggtaatattttggatatattaagtatgtaaaaattaatgtttccttttagttgttgttgttgttgttgttgttttgagacggagtctcgctctgtcgcccaggctggagtgcagtggtgcgatcttggctcactgcaggctccgcctctcgggtttgcaccattttcctgcctcagcctcccgaatagctgggagtacaggtgcccgccaccccgcctggccaatgttttgtattttttttagtagagacggagtttcaccatgttagccaggatggtctcgatctcctgacctcgtgatccacctgccttggcctcccaaagtgctgggattacaggcgtgagccaccacacccggctccttttagtttttaaatctgtctactaggaaacttaaaattgtatgtgtattagtctgttctcatgctgctaataaagacatacccaagactggggtaatttataaagaaaagaggtttaattgactcacagttctgcatgactggggaggcctcaggaaacttacaatcatggtggaagacatctcttcacagggtgacaggagagagaatgagtgccagcagtggaaataccaaatgcttataaaaccatcagatctcatgagaactcactcactatcatgagaatagcatgggagaaactgccaccatgatccaatcactttccatgaggtccctcccacaacacatggggattatgggaactacaattcaaaatgagatttgggtggggatacagccataccatatcagtattaaatttctgagttaatctacgcagaaatttgtagaagataggtacaaatgcaggaccattaaggcaaaacatctacatttggaaataacctatataggagtgatagttgatgttatgagattagattaaaatgccagtgtacaaagtatagagatgagaaaaatgtcaacaattataatatgggaagaaaaagagtaaccaggagaagaattggagattcaaaatgctaaaatggtatataagcctgactgggatagaattctaagaagaaaggagaaggaaggaataattaacatcattgaatgatagaggccaaaaaggaagaggagaaatgagaaaaggccattgaatttggttgatatagaagcagtttcagtagactgtaagagggatagattgcaagagattaagaagttagaggttaataaagcagactgtataggtaaactattctttcaagaatggagtccatttgtgaagataataatcacttgatttgagccaagtccagagaaatttgagcatttttgtttgctgaataaaaggatcagtgaggtgggagtgtttgaaattgtaaaagagagaagataatttctataataagatcctagagcattgtatcccaaacctgagtacatactggaatcatctggggatctcgttacaagggcaaatttccaggcaacattccacatctaaagttattatattccctggaggtttgtctcccccaacatgttgctagcaagttcttccaggtgattatgatgtatccacaggacaaacaaggaacttatgagtgctgatgaggtcatcagtgaaatgactggtcatagcatccagtttgratagatagccaattagggctagaatggggctgatggaccatgaactacagttaaggaattggctttcattattatgggaatatgtgcaagcttagtagaaatgaaaggctgaaaaagttaaaaaggtagtggattttgatcactgagggaactttcagaattcaggatcttggaggccaagcagatgcaaaatgtggctgtgtgtgtctggtgtggaaaaaaagataaaaagaactgagttacacacatcgtaagacccagcagtttggtaactaatacatggcagtggtaaaaaggtataggatttgggataaggaaagaagcactaaaggttcaatcacatatgtaattatctrgacttcagattccactaaaccttggctttaatatctttgataaacattttcagagtggagtgcctacttgggtttatagcctttgaatttccatgattcactctagattttgttgaaaataccgtgggtacttgactttcatagataatatatgcacagtcttgaccagttacaagtaaccctaagggtttatgataatgagtagttaataattctttgcaaggcatgaatttgaatctcctgccctaaaactggcatggagaagcaagtcacttagctagtgctttgtagtgaagtcaacatttacttctaagtttgtctttaacacatgattatattaatcatcagacctcaccctggtagatttaactaccaggaaattaaaaggaaatgtatatgccaaactgtagtattaaatgagttaaaaacttgggtttaaaaatcaaatgagttaaaagtttgtagcgtgacacctaccgtgtaataattacttaataaatggtagtcactggtaccagttcaggaattcaaccatttttgaagccaaattttttgtgtatgtccatgcttaatgagtaatatttatattaaaaattttgttttgatccagtatctccgtaaattattaaactgaaactagaatgttaaatttgttagtgaattaggaagwtaatgggtsatttatcacatatttgatagggggtatattttatagtaattcgtattgttattatgaaaaaattagaactcttaaaatcctttaagtgtatttctntagcacaagtatacatacacagaaacaaaatgaatgaattacattattcactttatttttcttagatgtagtataccaatgattctgtttttgctaaacaacttttactctcaatatattatatacttatataactctttttgctttatagtgaagagctcagaaaagaagcaagacaattaaaacgggaactcttagcagcaaaacaaaaaaaagtagaaaatgcagcaaaacaagcagaaaaaagaagtgaaggtaagggcatttatcacgcttattttttcacttgatactcctccttctctgttttcttagctcctccctgcccgctcccgtattcatcccttcccttctcctttccttctcattttttcttccctctttctttccctccctcttgagttagggggtgtgtgtgtgtgtgtgtgtgtgtgtgtgtgtgtgtgtgtgtgtgtgtgtttttaatactttctttgaacagttagccaggaaaataaatttccacccaggaaatttgtctaagaagtaaattcagtgcaaatgggattgtaactattgttcttaagtaaccttcatgaaaactaacagaatacttgaaatctagcaaaacttaaaggttgccatagcatctaactagattaaaagtgcacaagggtggaatgtttatatatatattgcatattctttaaaacatttttaaaaagtgtttgagccctgtggttgggacttaggtaaacatttgtgtgttggtttgaatagtattaaatacctaattttgttttttgtttgttttttgtttttactcttatgttaagacatagaaagtctaaagtattgataaagctgatcaaaataacatcttgctgtttatacaggttaactagcttctttgtttcactacgatttttattaagcttcaaaaaaaaagctttttcattgatgatctttaatttagtttaaaattgtttcagctataaagcatgtaatgttcagtttctaaaataacagcttggaacccacatctgttttctttttacagtgataaattgtattgtccattcagtgaatatgatcagaaattttattcaattgcctcttataatgtatactaagtttgatacatttgatactaagtacatacatgtacacatttgcttgtacatatatattctatatttttatgcttttgaaagcttgaagtgttttacctactagattctattaacagtcactggaagtatattaacaaataagatgtagcatctagccttaaagactacacattctaatacagtggcacaatgtttggccataggtattattattgtttattttaagtagcatgagtaataccagataactatttaaagggcgtagttctcaattctaagattatttgtacaaaatccccaatgactattttcataaaggcagatattatacatacttcatgaagatttgaaagtcattgaagtatatatttgaatgaaacattatttaaaaattaactgaagtataatggcacaaataataaacaatttagaagaagggataaacttatttgtgactagatcatgaaggcaaaatgtaacccagaatagaaacagtatcttagcattaatgagatttgaaacaggtacagtcaggattattttatttttaggtttataagtaattttcttagaagactgtttcttataattaaaagtattttaaatatatgaaaataatttcaactagaaagatctttcaactagaaagaataaaatataaaacttaaatattttatttgcttttgagctaataattattagtaccctcatgtcttaaacactatgctggattaggagtgtaacactgtgacttatagttacgatctagtaggagtgaaagaaatgcaataggtatactataatagtgccatacaggtaaggcctatattagacataagcagtgctaagtttatttatttgtctccctttgaaataataaataggtaggtaaagacattagtcttaaagactgatttcttaatgcaaaagagaagattcttaacagagctcatttcaatctgcttttatttatttatttatttacttattttttgagatggagtctcactctgtcacccaggctggagtgtggtggcgcgatcttggctcactgcaacccccgccttcgggttcaagtgattctcgtacctcagcctcccaagtagctgaaactgcaagcatgcaccaccacacctgtctgattttttgtatttttagtagagacagggtttcaccatgttgatcaggctggtctcgaactcctgacctcaggtgatctgcctgcctcagcagtgtcagaatgttctgacacacattcaaggattcctaaaattttactatgtttccataatgctatgtagtgagaaagctcatggtatcatttttaatcatgaggaaagaagaatttcaaatataatgtggtatttactaaaatcacacatttttcataataaattcatagtcaattttctaccattataacagcaatacttgccaattttaaaagatcacagtaactttaaaggaaatacaattctaagaaaaaggtaatccataatgtacatcatagatggttctaagaaagaattttgctaagcactctaacaaaatactgataataaaacataataaaatattgctcctaatagcactctaacaatattagaatcaaaatcaaatggtctacttagtgcccagctcttgctttctaaaaacagtactccgattagagtaaccacagctcctcaaagaagtggttgattgcaggtctggagaactgaaaatacaagatcagccggaagtatcttgtggtaccagaaagtaagaaagtgctcaaaggatggggacaagctaaaagggcacacaagctaacctgaaagagctaccaatggccaaagctggaaaaatttgaaaaaaataaataataatagtttcatataattaactaaatatataatatagttaatataattatatataatatagttaatataattaactatatatagtataataaataatataaagtatataaataatttgtttatatataaatatataaataacatatattatttattattataactttataaatgtcaacatatataaataatgtatattttgggattataacactatataatttacatttaaatataaatatacaaatagcatatattattatttattattataacatacatgtcaacatattatataaaatatatttataaatatattggcatacttataaataatttataaataatataaatattcacagctcatactgaagtaaggatgtaaataacagaagagaaagttctttcttacagaattccaagtaattaaaatagaaatcagagaactagaaaggcactattagaacaccacagtaaataactgttgccaataagcaagatctaccatctaccaatagatgctaaagttagtagagagaaacttgaagagaaacagaatatttgtatagtgtcaaagtattttcccctaaatatttataaaactcaaaggtaaaaagagtaactttatagtacagcaactcagcagacaccattttaaccaagggatcgaggtaatatcaccaacaataagacagaagacattgtgttactcctgatataatgcactgagaaggaatactacttctgtggtaatcttcccaaaaataaataatcataattcaattagaaaacatcaaactcaaattgagagacattctacaaagtatctaaccaaaactcttcaaagtgtcaaggtcatgaaagacaaggaatgattgatgaattgtcatagatcaaaagagactaaggagacatggcaaataaatgcagttcaatcctagatagaatcatagaacaaaaaaaaaggatattagtgtggaaaatggtgaaattctgataaggtctatagttagttaatagtattgttccaacattattggcatggttttgatcactaatctatggtcacggaaggccttaacattaaagttatatggtaactgtattatttttgcaacttctgtgtaagtctaaaataatttcaaaataaaacaacgaaaagtaaataaataaaatggcacattttgagatgagaaaatacaatatcaatcaaatgacccaattttgggtgaagctaattttaacagtcatttggatttagagaaaatccagttatttctatatgatataaggaaagttaacagaaaaatacttactaatataattctctttctaattatggcataaaaatattttcacatggttaacaatcataaaagcaaattgaggccgggcgcggtggctcacgcctgtaatcccagcactttgggattgaatatagaatttgcagtaggctctaacaccctaatttaggtaaacaaaaaatgtggtgttttactatagataccagcaatgtcaaaagagatgtactgcaggacaatcctgtttacagccttggagtgtctttagtcccattgtaaatcatcaaggcctgtgcataaggttgttgtggggggtgggaggataataaattttgaataagattgatggttaattggagatagagttggtttcctgtcttggctctgtcaggttctttaataaactatataatccttttcattaaatcatgtctctaagtcttttccagatttctttaagtttcatatcaaaaccagtaccaaactgaacatagtcacatagagatgacaggtttggacatattctctaatcagctttaaagagataaggtgttaggtcctctttcaaagttctaagcagacaattcctgctctatgactggtgccagaaattagaggagaagggtcaggctgagcttgtaaatcaagaaaaaattttaaagccttttcatgaaacatatccctgaggtgcctagtacctctcaagttgcactgggttatttcacatttcttcagactatctttttaatactggatcaaatcagactagagtccctcaggcttgataggttgtgaaagtatatagtttttgagtacttttcatctgggtaatatatagtattaaactagcttggtcttagttggtataagaaacaaaaaccctctttgagtgttagctctgtgttctacttaataccatgtaaaattttcttattgagcaaactggttctcttttccaaagcagttaactttctttaggtactgttgagttattttttttttcttggaacccagaagtatcagacctatttttcttcgtagtctactcttaatctatgtgctaatttttactttatttacataaagtgaaagtatatttgcacttgactcattggatgcatctcaggccagccatcattttctagttcttcttactttgggcatagccactaataaattgattatctggttttctaagctaaaaaccaattaaagtataaaagtgagggagcgtatactctaaaagggtgaattttatggaaagtgaagtatatctcaataatttaataaataaataaacaagcaaaagagaagccagaaaaggcactgacctgtggacctttctagcccagtattttattgggctaacaacaaattttttttaagtgtgagagaaaagcatggctagagacattcattcattttggtagcagcaagaggtgatcgccaaccagctgacactaggtcaggaaacacaagaacataagagtcaaatattatggaaatacttgttaaacatactttactctgaatgtgtatatctttaaaagataaagttatccctacctattgtaatgggcctgattcattaagagaagtttaaattgtatttattattctttaataagatagagaatgggcaatgattccaacctaattagttaaaaaaattaatcattttaatcaattaaagataaagttctcttatctagactattcagttgtgtggaatacctcatttcctgaaagtcctggaaaaatagagctttattctgtagctagggcagtcggcctctcaactgaaattttcttgaaccccttactacctttaagtgctagaaaccatgcaatattttaaacaagatatctttcaataatataatttcttaaatagtaaagatttttaaaggtctgtagcaaatatgaagatgtacataccctcacaattacatgaaraatttaatcttttggtaaagtaagagatgatcatctttaagagtccataaagtactttcttcttttttagacaatctatctcaaactttyttccaagtcataattagcgaatcttgttgagctttactttgtgaaccctacattataggcatatttaatttttatgagcaataaaaaataaattctaaccaattcacatatttttatgtcttaaattctgggtcatcttgcagacctcctagtgttgcttgggatactttgttgttgttgttgttgttgttgttgttgttgttgttgttgttacagagtctctctctgtctcccaggttggagtgcagtggtgcsatctcagctcactgcaacctccacctcccgggttcaagcaattctcttgcctcagcctcctgagtagctggaattacaggcacgcaccgccacacctggctgacttttttatttttagtagagacggggttttgccctgttggccaggctggtgttgaactcctgaccttaggtgatccggctgcctcagcctcccgaagtgctgggattacaggcatgagccaccactcccagctctgttgctactcttattaagaaccaatgtatttaggatatctctctgcatccctttgctgtcttaacacagttttctaataacctttctttctggcctggtggttgtaatttcaatgttgagaatttgacaagagcctttagctatatttttagtaactgcaatttgtcctcctattactaatatctgtgtcattcctgacccagtaaaaatagattgcttaattcatacaggtaaatattagttgggggtcattactgtctctttatttaaaaaaaaaagctgtatttcttacattataaaagtaacatttattctttgcaaaaatatcagaaatgtagaaaggcataaaggttaaaaagaaagattaccccataatacttcgccaaagataaccagttaactttgtgatatttattttttctggatttgtttcttttcatgctataaacacacgtgtttttttccccataatgtcattttgttataattttgtttataatatkcctttttaaaagaatgtttatattgaaattgaccaagaattcttaagggggcarcttgctttaggagtatgtcttcttaattatcttacatcacacaacrtgagatatagaggatgatggatgtaaagaccgtacaaatgcagttgagacatgaaaaattcccactatttcagctctggggtttagactatgtgggagcaatgatagccagggactacatttccattgctgatgagaattctytatctctcgttctttaaaaaaaaaaaaaatcatttaaaaagtcattaaaataaatcctgagctcatgttgtagtctgttacctctttctcagctggccactaaaaattctgcaaggaaagattacattcaggttaggtatttggagcctacattgaaataattacaaatttgtccactcttggaaagtagaagaggtgaagggtatgtgtatgtgtgtgcgcacatatgcacgtgtgcatgcgcacacacacgtgttttattgttttgttttgtttggatatttagattgtctccagagaggaactaatatcatcattaaaagtttgattataaccagtgttcccatttgggaatggagttgttaacttttccagactgctgtcaagaccttattttaagtaagatgttttccttttatgtgacattttctgaggttttgccaaaaatgacatcaaacatataattcattcgagtgctgagtttcttcaacatcttgcagcacttaatcaaatttgggaaagatattcttttcacaactttatagtgtaaacctgtgaatatgttgcattaaaccttactttgtacagtttaatctgcatggtatcaggttgatttttaaaaaatgattaatgcaatagctgatagtttttaatgattatattttcaaattctgcacataaactccaggcagatggtacagttgcagcttttgagtattagtattttttcacacaaaactcagataatccctaaattatattaatagctacattaaacaatgccagaaagaacaaaaggaatactgaagttctcagaaaactaacaagatgcccaaatactgagaaatcattgagaacctattttgatatacaaaaatattttaggttttttaaagaagactatggccacgccagaatgtaagtttgtttaaaacattatgctgcagtatgttaaaatgtgaaagtaagctagccttaacgaacgtcttactcattagaaactctgatcttgcgtgtgctctatttatatttgttacttctgtgcaataatcacagtcctgaagggatcatctgggccaatccctccttttttttttttttttcctagatggaatctcgccctgttgctgaggcttgagtgcagtggcacgatctccactcactgcaacttcctcctcccaggttcaaacgattctcctacctcagcctcccgagtagctggaattacaggagcccgccaccatacccagctattttttgtatttttagtagagacggggtttcaccatgttgaccaggctggtctcgaactccagacctcgtgatccacccgccttagcctcccaaagtgctgggattatagatgtgagccaccgcgcctggcccctccattttatatataaaggaaacctagagcttgccagttaaggtgcttacccaatattacagagcaaagtaatagaactagaactcaggacccttagatttgtgtccagtgccctttatactacttgtttttcaatgtgatccaaccttgagtggatgtagtctatataaagttttaattggtatttattaaaatctactttggttttggctagactaattgtttctaaaacccccctaggcaaacttagagtcttttggagagcacattattatcataaatctacacctttttaaagattacacatgtgatttgggaatgaatgacaaaagattattatgtaatggaacacatcaatttctgtcactatggcagcctaggagtccaaactgatcccctcactaaaaacaacgaaaaatgttggatataatacaaaaatatcttttgatatgttcctatgacttgcaaaaatgcaaggaatacttaaaccagggaataagtaaaggtatgaactaagataagttagtggagcactaggtcaggctttaaccctaaggacatttgttaaattgagtgaactggaacattgctttttgaaatctcacaaagttcatggaagattatgtaaaacttaaggttttcccaaggtagcgagggtctaacaagactattctgtgtagttgagggcccaaaggaacacatccttagtggcaggaataattagaaataagcagggtcacctcatttccatcagtgggctacaagggaaattacctatcttgaatcatggcacaaaatatttgggagcaagagcatctcttgggaactctagcaacaaggcagccctcccatcagttaggagtctaaattcacactgcctgagtggtctccaaatcttccagccaagaatttagttgcaatgatagtcttggagaaaaatatgagcaatatgtgttcacagataatatgtgaacaccctatacaatgtaacagtctccttatgcatcagagaaaaatatgaacagcatctatagcatatgatatgtgaaaaactgctttaaatctgtaataaaagaccaacaacctaacagaaaaaaaaaaaggaccagaacacagaaaattcatataagaaaaaatttgagggacatcatggtcactttcaagttttgacaattatgaacaattttgtgtggaataacaaacaataaaagaatttagttggaaatggcccttgatcttaagtgcctgtagaagcctgatacaaacaaacataaatttttcctggagaatcctactttcatcccagtcctcaaggaaagtataaaaagaaaaagaacagctcagaagacacatatgcactgaattcagacatcctgaccaaaagctagtagaaacatcagacaacagaatgagatccacaaaaagttcagattttattcagacactaaatgttaagtaagtgtgtgtaatatatttcaagaaatgataggcttgaaaatataaagaacacgtgatttaaaaacaaakaagatatagaaatgaaaaatataatagttaacattaaaaacttgatatattttatagcaatttgccacagctaaaatgaacattagtgacttgaaagatagcattaaaaaatcatgtagaactcagcccaaaaacagattggaaacctggaagatctaataaatgtttaatcaaattctaggaggagaccaaagggcaaatagaggcaatatttagagagatgatactgagtgttttatataactaatgaaaagatcgattttacagaatgaagtctccccaaaactaaaagaggataaagaaaaataaattcagtcctagatgcattatgataatacatcagagcattcaacacaaagagatcttaaaagcagtcggaaaagatattaccattaaaaaagcaagagctgatttctcaacagcaacaggtgaggacataaggcagaatcttattttcaatggactgagggaagtgtccttcagacaaacaaaagctgaaaaacattgctacctgtggaccttcaccaaaggaaattctaaaggatatacttatggcaaaagttaggtgagcccagatgtaagacctataatacaaagagttaggaacatggaaagtggtaaatatatgaataaatctaaataaatattgaaggaataaaacaatgataatgtcttatgttgaataataaaggtaaaattaaaaatacataacaacatagtatataactttggtgagcaggtaaagggtgctcggaaaagcattctacggcccttttattgtttgggaagaaggtaaagacacaagataaactgtggtttttaagacattaattatacattttaaaatttttagggaaactactaacaggataaggaagggtcttaacttccaaaccagtagagaaaaagatggaattaggaaaaaaaaaaatcaacccaaaggggataagaaaggaaagaaaaataaacatggactggcaggatatttttwaaaaaaaagaaaaaagatggcatgagagataggagaaataaaatgcagctgtatcaatagttgtattgaaataacacaaaaagtctaatacttcgcctaaaaaactacgtttgtcaaactgggccaaaaaagaaattcaatgcaacttatgtkagaaacatcttcaaaatattggacaatcaagccgcgcacggtggctcatacctgtaatcctagcactttgggaggctgaggtgggtggattgcctcagctcaggagttcaataccagcctcggaaacacagtgataactcatttctactaaaatacaaaaaaattagccaggtgtggcagtgtgcacctgtaatcctagctactggggaagctgaggagaattgctagaacccgggaggcagaggttgcaatgagccaagattgctccagcctaggtgacagagtgagaatctagaagtagaaataccatttgacccactgatcccattactgggcatatacccgaaagattataaatcatgctactataaagacacatgcacacgtatgtttattgcagcactactcacaatagcaaagacttggaacctacccaaatgtccgtcaatgatagaatggattaagaaaatgtggcacatatacaccatggaatactatgcagctataaaaaaggatgagttcatgtcctttgcagggacatggatgaagctggaaaccatcattcttagcaaactgtcacaaggacagaaaaccaaacaccgcatgttctcactcataggtgggagttggacaatgagaacacatggacacagggcagagaacagggaacatcacacaccagggtcggtcagagatgggggataaggggagggatagcattaggagaaatacctaatgtaaatgacaagttgatgggtgcagcaaaccaacatggcacatacatagtttgttacctatgtaacaaacctgcacattgtgcacatgtaccctagaacttaaagtataataataaaaaaaattggacaatcaaatcgttaaggcaaaatgtattactaggcctagaatctccacataacacagaaacttcagtttaccaggaaaatgtaataatccctaacttgcatagacctaataacataaactcaaaatctatgaagcaaaaactgatagacctagaataagtaagcaattccattatagtgagagattttaatacattctctcagtaactgattaaacaaacatgtaaaaatttaataagaatgtagaacatttgaaccacacaattaacaagtttgatataatgtacaaaagggaatattgcttcagaatacatattattttctagctctcttgaaacatttatagaaagtggccacataatggaccataaagaaagaaaattttcagaggattgttttcagactacatcttctgacacaatgcagttgttaggaattagagttactgatttccaagtatgttaatgcagccatagcagtacttataagcagttattgcattagatgctagtatttcaggaaattactatagaagttccccacgtaaagaagccttaaaaaaaaaatacaaaacgcaggcaaaattagcccaatgaagtagaaggaagaaaggaataaagagcagaaatcagtaaaatagaaaacagtttttagaactgggttacaatagttaaaatgaccagaagtataacttcttaaaacttgcacatagtagatagccagaaaattgatttgactttgttgtatcagacatttgtcacttgttttttcccagatgtccttctaatgcagagaaagcaagatctagttgctacgtacaaggagtgtcattagtgaaatttctattratagtgctagttttattagctacaaaagaagttgctgttaaaaaagaaagagggagagagaggcaagcagatggataaagactcaaaaaatgccatgtttaaataagattgaggattatttctctcatgcagaacaattcagggtgagcacttcaggaccagcaggtatttaaggacccaagtttttttcatttttgtctttttggcatcttctgaggtgttatcattgtctgcatgattcaacccgacccacctccatgcctatattccagcaacggggaagaggaaagagcaagtaccagactggtgacttcatctttgaggagatgacccaaaagttgcacaaaagcactttcactcttatcatattatactgaaatcacatggccatacctagctgtaaaaaaggctgagaaataaagtctccagttgagtgtccaagtggctggctaactaaatatcaaggatgggagatatatggggttgattcctttactaaaaggtaaaagggatgactgaattcagggagaaaattactagattctgttatataatatgaacaaaatcctaggaagaaccaaataggcggtagtccattgggtcaggaaaagcttgaccaagtatctgagctatgttttgagagatgaataaaattccactgcaaaatgaagggcaataagtataacagtagttggaaaggtgcctggcagagcaggagccatagattcatctctatatgcctaatactttgcatagtaatgggcaaaataataagcattcaacaaacatttgctgaagtaatgaatgaaactggcttttgcttaagtgaataatcacattatttgtaaactaaggaaaaaaagaataacaatgaaaaagacaattttttgagtatgaatctatgacaacacgaagagcacagatgcacatttaaataatgggcaaagtttcagataagagctatgaacatattatgaaacaggacaatgtaatttggtggtatgtaccagaaagggcccagtcaaaagacagaatccacaaacaaaacttttgaacagaaacgaaaacatttgtaatagctttattgaagaataatttaaagtgaactgtttgacatgttttgacgtatgtctatacctgtgaaaacatcaccacaatctagataatgaacatgtccttcaaggcccaacatgttctcatgccccttgttaaccccctctctgatcccctggcaaccactaaagtcttctatcactataaaatagttgtattttctaaatcttatttaaatgaaatcatattctctatgtacttttttgtctgacttctttcaatcaacatatgcattttcagatttatccatgttgtatatatcagtagtttgttccttttattgctaagtagtattccattatatagatataccacaagtattttataaccatatgctattattttgcttgagcaaatgtctggaagtggaatggctaagtcatgtgataggtgtatgttcaactttttgaaaactgccaaactgttttccaaactggttgtgccattgtacatcctacaagtagtgcataaactatcctgttaactccatatccttgttaacacttcgtgtggtcactttctaattttagccattctaatagtttgcagtgttactttgtggttttgatttacatttaattaataatgatgttgagcattgtttcatgtgcttatttgtcatccgtatatattctttggtgcagtatatattcaactctttttatccattttttattgtgttgtttgttatttactattgaatttttagacttctttatattctttggatacaaatcctttatcagatatatgatttgtaaatatttctctcaaacggtggcttatattttttgtcctcttaatggtgtctttcaaaaaacaaaacttaaattttgggaaagtctaacttattaactttgttcatttttgaatctagttattggttctaagaaatctttgcctgactcaaactcaaaaagatcttctatgtgttttttttttagaaattttgtagttttaagattttacattaagatttgattcactttgacttaatgtttatatatacagtcacatatcccttaacaatggggatacagtctgcgaaatgtgttgctaggtgattttatcgttgtgtaaacaccatgtgagtgttcttacacaaagcttactcaaarctagatagtatagtttactatacacctaggctatatggtgtggcccaagcttgtccaatctgtggccagtgggccacatgtggcccaggacagctctgaatgtgccccaacacaaattcataaaccttcttaaaacattatgagacttttttgtgattttttttttttagctcatcagctatcattagtgttagcatattttatgtatggcccaagacaattcttccagcgtgacccagggaagccaaaagattggatacccctggtataggctattgttcctaggctataatcctgtatagcatattactgtactgaacattgcaggygaytgtaatacacaggtaagtatttgtgtatttaaacatatctaaacatagaaaaggtacagtaaaaatacggtctaaaagagatggagaccatcctggctaacacagtgaaaccccgtctctactaaaaatacaaaaaattagccgggtgtggtggcaggtgcctgtagtcccagctacttgggaagctgaggcagaatggcgtgaacccgggaggtggaacttgcagtgagccgagatggcaccactacactccagcctgggtgacagagcgagactccatctcaaaaaaaaaaaaaaaaggtataaaagataaaaagtggtatacctgtataggcacttatcatgaatggagctcacaggactggaagtcactctaagtgagtcagggagtgagtggtgagttaatatgaaggcctaggacattacactgctgtaggatttataaatactgtgcatttaggctgcactgaatgtatttaaatttttttctctctttaataacaacttcggcttactgtaacttttttactttatgaactttttaatttttaacttgactgttttgtaatcacacgtagcttaaaacacaaatacattatacaactgtacaaaaatattcaaaaatattttctttatatctttattctataagcttttttctacttttaaattcttctttttccttttgaagttttttacttaaaaagaagacaaaatcacacaaaagcctaagccaacacagggtcaagatcatcaatataactgtcttccacttccacatcttgttccactgatgggtcttcaggggcaataacatgtatgaagctgtcatctcctatgataacaatgccttcttctggaatacctccatacggacctgtctgaggctattttacaattaaaattttctttttataggtaggagtacactctaaaataacaataaaaatataggataataaacatatagtcatttattgttattatcaagtattatgtactgtacataattgtatgtgctatacttttataaaactggcagtgtagatttgtttacaccagcataactacaaatgcatgagtaatgtgttgctctacgaaattatcatggctacagtgtcaccaggtgataggaatttttcagctccattataattaatcttatgacaccacctttgtgtttgcagtccattagttactgaaacattgttaaatagggcatgactgtagtgcaaagtatggatcgaagtacacatatttccatattgatggctgtttgttctagaccatttgttgaaaagacaatcctttccctactgaattgcccttcaacttttgttgaaaatgaattgcccatatatacatgggtttattctatatattatatatgggtctattctgtcccattcatctatttatctatgtttacaggaatactagtatcttgatcactatggttttataagtcttgaagtcaagtgtaagtcctcccacatttttcaaagttgttttgtctgttctacgtcatatgcatgtccatgtgaattttaggatcaactaatmaatttctacgaaaaaaaagcctgctagaattttgattgggattgcattgaatatataaatcaatttgaagaaaattgacatcttactactattgggtagtaccacccatgagtgtgttacatctttccatttattaaggtcatctttaatttccctgagcactgttttgtagttttcaatgtagaggtcttgtatatatttgtcagatttcttcataagtattttacatttttatgctaccataaatggtattgtctttcgtaattgatagacttagtcaggaaacaacaaatgatggtgaggatgtggagaaataggaacacttttacactgttggtgggagtgtaaattagttcagccattgtgaaagacagtgtggcaattcctcaaggatctagaaccggaaataccatttgacccagcaatcccattacggggtatatacccaaaggattataaatcattctactataaagacacatgcacacgtatgtttattgcagcactatttacaatagcaaagacttgcaaccaacccaaatgcccatcagtgacacactggataaagtaaatgtggcacatatacaccatggaatactatgcagccataaaaaaataatcagttcatgtcctttgcaaggacatggatgaagctggaaaccatcattctcagcaaactaacacaggaacagaaaaccaaacgctacatgttctcactcataagtgggagttgaacaatgagaacacatggacacagggaggggaacatcacacacaggggcctgttgggggatcggggcaaggggagggagagcattaggacaactacctaatgcatacggggcttaaaacctagatgatgtattgataggtgcaggaaaccacaatggccacatgtatatctatgtaacaaacctgcatgttctgcacatgtaccctagaacttaaaataaaataaaaaataaaaataaaaaaagaaattgatagacttttagaggagtttagacctatagaaaaattaagcatagagttcccacataccgtcctttctgacgcccctcacagtttcacccattattaatatcgtgcattaatttttttgtgactgacttcttttacctgccttaatgttttcagagtttatccacattgtatcaagtatcagcacttagttcctttatcaccaaataatattccattgtatgcatataacacattttgtttatctacttcatcacttgaaggacatgtgagttttttccacctcttggctattatgaataatgctatacagtgaacatccttgtgcattcactttgctttaagccttcatgagcagtctcctcaaagaccaccatgcttctacaaacagtttaagactctccaagttttcattaacaaattcttccaaatccttccagcttctgcccactacaaggtttcaaaccattcacatattttaggtttttctttaggtcagcaccccacacctggataccaaaattctgtattagttacctattgctgcataacaagtgactccaaaattaacaggcttaaaaaaacattaagtttttcatagtttctatggatcaggaattcggaacaacttagctgagaagttttgcaacttatgaggctgtaggcaaaatgttgaccaaggctatataaatctgaagacttgatttaagtagagaatctactaagatgactcattctcatggctgacaggaagcctcggttccttaccatatgcacctctccatagtgctgctttcatatccttatgatatggtatctgggttccccagaacaagtgattcctttggtatggtggggagaagaggcatgagaaagctacaatgcctgctattaactattctgtaaagtgacacatgtcactaagtctagcccacattcaagggaaggagagttagtcttcatcttttgaatcccttcaaagaaactgtagacatactttaactaccacagatagcaacccagagttccaaaacggactgataaacacactgaatgcaaccatgactcagataaggattggaatagatgacttcctaagatatctttcagctcataggaatttaattgtaagacctacctatatgcaacctcgagatactagaacagctctgtatgccctttaaactgctaataaatatgggccaggcacagtggctcatgcctgtaatcccagcactttgggaggccaaggcaggtggatcacctgaggtcaggagtttgaggccagcctggccaacatggtgaaaccccatctctactaaaaatacaaaagttagccgggcatggtggtgcatgcctgtagtcccagctactcaggaggctgaggcaggataattgcttgaacctgtgatgcagaggttgcagtgagccgagattgcaccactgcactccagcctgggcgacagagccacactacatctcaaaaaaaaaaaaaaaaaaaaaaaacacctaatgaatgcatatcttttctttcctggccaggcttcatgattactaccttctccacactcaagctaagatgcccttaataggaacatgttacttaccattagatcaagtctttcaacctcctcctgccccacttttctggcttctggtccatgcagggccagtttctttactttctgtcttttagaacagtggtctccaaaatggcacagagatgacccattacagtaaagggagaaagcgtctgaacttctatttctgtttatcttttaatctgaaaataaaagactgaatgaaaagaacaaaagaaataaagactagtaatgcccataatttatgtaaatttgaataaatatacaaatttttgagggtgaatgctcaaaatttttttacaaattaagatacatgatgaaaagtctaaagaacattggtctagatgtagcactgaaattctttatattattattacactttaagttctagggtacatgtgcacaacatgcaggtttcttacataggtatatatgtgccatgttggtttgctgcacccattaacttgtcatttatgttagatatttctcctaatgctgtgcctccccctgtctcccaccccatgacaggccccggtgtgtgatgttccccgccctgtgtccaagtgttctcattgttcaattcccacctatgagtgagaacatgcggtgtttggttttctgtccttgtgatagtttgctaagaatgatggtttccagcttcatccatgtccctgcaaaggacatgaactcatcctttttttatggctgcgtagtattccatgttgtatatgtgccacattttcttaatccagtctatcattgatagacatttaggtgggttcgaagtctttgttattatgagtagtgctgcaataaacatacgtgtgcatgtgtctttatagtagcatgatttataatcctatgggtatatgcccagtaatggaatcagtgggtcaaatggtatttctagttctagatccttgaggaatagccacattgtcttccacaatggttgaactcccaccaacagtgtaaaagtattcctatttctccacatcctttccaatatctgttttttcctgaccttttaacgattgccattctaactgctgtgagatggtatctcwtggcagttttgatttgcatttctctgatgaccagtgatgatgaacattttttcacgtgtctgttggctgcacaaatgtcttcttttgagaagtgtctgttcatatcctttgcccactttttgatggagttgtttgtttttctcttgcaaatttgtttaagttctttgtagattctggatattagccctttgtcaaatggatagattgcaaaaattttctcccattctgtaggttgcgtattcactctgatagtagtttcttttgctgtgcagaagctctttagtttaattagatctcatttgtctattttrrcttttgttgccattgcttttggtgttttagtcatgaagtcattacccacgcctatgtcctgaatggtattgcctaggttttcttctagggtttttatggttttaggtctaacatttaagtctttaattcatcttgaattaatttttgtataaggtgtaaggaagagatccagtttcagctttctatattcagccagttttcccagcgccatttattaaatagggaatcctttccccattttgtgtttttgtcaggtttgtcaaagatcagatggttgtagatgtgtggtgttatttctgaggcctgtgttctgttctattgttctgtatatctgttttggtaccagtaccatgctgttttggttactgtagccttgtagtatagtttgaagtaaggtagcatgatggctccagctttgttcttttggcttaggattgacttggcgatgcgggctcttttttggtcccatatgaactttaaagtagttttttccaattctttgaagaaagtcattggtagcttgatggggatggcattgaatctataaattaccttgggcagtatggccattttcacgatattgattcttcctattcatgagcatggaatgttcttccatttgtttgtatcctcttttatttcattgagcagcggtttatagttctccttgaagaggtccttcacatcccttgtaagttggattcctgtgtattttattctctttgtaacaattgtgaatgggagttcactcatgatttggctctctgtctgttattggcatataggaatgcttgtgatttttgcacattgactttgtatcctgagactttgctgaagttgcttatcagcttaaggagattgtgggctgagacactggggttttccaaatacacaatcatgtcatctgcaaagagagtcattttgacttcctcttttcctaattgaataccctttatttctttctcctgcctgattgccctggccagaacttccaacactatgttaaataggagtggtgagagagggcatccctatcttgtgccagttttcaaagggaatgcttccagtttttgcccattcagtatactggctgtgggtttgtcatagatagctcttattattttgaaatatgtcccagctcctggattcattgattttttgaagggttttttgtgtctccatctccttcagttctgctctgatcttaattatttcttgtcttctgctagcttttgaatttgtttgctcttgcttctctagttcttttaattgtgatgttaaggtgtcgattttagatctttcctgctttctcttgtgggcatttagtgctataaatttccctctacacatgctttaaatatgtcccagagattctggtacattgcgtctttgttctcattggtttcaaagaacatctttatttctgccttcatttcgttatttacccaggattcactcaggagcaggttgtttagtttccatgtagttgtgtggttttgagtgagtttcttaatcctgagttctaatttgattgcactgtggtctgagagacagtttgttgtgatttctgttcttttacatttgctgaggagtgctttacttccaactatgtggtcaattttggaataagtgcaacgtaatgttgagaagaatgtatattctgttgaattgggctgaagagttctgtagatatctattaggtccacttggtgcagagctgagttcaagtcctggatagcattgttaaccttctgtctcgttgatctgtctaatattgacagtgggttgttagtctcccattattattgtgtgggagtctaagtctctttgtaggtttctaaggacttgctttatgaatctgggtcctcctgttttggctgcatatatatttaggatagttagctcctcttattgaattgatccctttaccactatgtaatggccttctttgtctcttttgatctttgttggtttaaagtctgttttatcagagaccaggattgcaacccctgcttttttttgttttccatttgcttggtagatcttcctccatccctttattttgagcctatgtgcgtctctgcacgtgagatgggtctcctaaatagagcacactgatgggtcttgactctttatccaatttgccagtctgtgtcttttaattggggcatttagcccatttacatttaaggttaatattgttatgtgtgaatttcatcctgtccttatgatgttagctcattattttgcccattagttgatgcagtttctttctagcatcgatggtctttacaatttggcatgtttttgcagtggctggtaccggttgttcctttccatatttagtgcttccttcaggaactcttgtagggcaggcctggtggtgacaaaatctctcagcatttgcttgtctataaaggattttatttctccttcacttatgaagtttagtttggctggatatgaaattctgttttgaaaattcttttctttaagaatattgaatattggcccccactcttctggcttgtagcgtttctgctgagagatttcagtggaaacctctgctgagaggtttcagtggaaactgagactgacagtttccactgtcagtctgatgggcttccctttgtaggtaacccaacctttctctctggctgcccttaacattttttccttcatttcaaccttggtgaatctgacgattatgtgtcttggggttgttcttctcaaggagtatctttgtggtgttctctgtatttcctgaatttgaatgttggcctgccttgctagattggggaagttctcctgaataatatgctgaagagtgttttccaacttggatccattctcccgtcactttcaggtacaccaatcaaacgtacagcatggtcttttcacatagtcccatatttcttggaggctttgttcgtttctttttacttttttttctgtaatcttgtcttctcactttatttcattaatttgatcttcagtcactgataacctttcttccacttgatcgaattggcaattgaggtttgtgcatgtgtcacgtagttctcgtgccagctccttcagggcatttaaggtcttctctgtgctgtttattctagttagccattcatccaatcttttttcaaggtttttagcttccttgcaatgggttcgaccatcctgctttagctcagagaagtttgttattaccgaccttctgaagcctacttctgtcagctcatcaaaatcattctccatccagctttgttccattgctggcaaggagctgtgatcctttggaggataagaggcactctggtttttagaattttcagcttttctgctctggtttttcccatctttgtggttttatctacctttgatctttgatgttggtgacctacagatgggattttggtgtggatgtccttttyattgacgttgatgctattcctttctgtttgttagttttccttctaagagtcaggtccctcagctgcaggtctgttggagtttgctggaggtccactccagaccctgtttgcctgggtatcaccagcggaggctgcagaacagcaaatattgcagcacagcaaatattgctgcctgatccttcctctggaagcttcgtcccagaggggcacctgcctgtatgaggtgtcagtcggcccctactgggaggtgtctctcagttaggctacacagaggtcagggacccacttaaggaggcagtctgtccattctcagagctcaaacaccatgctgggacaaccactgctctcttcagagctgtcagacagggatgtttaagactgcagaagtttctgctgcctttagttcatctatgccctgcccccagaggtggagtctacagaggcagcaggccttgctgagctgcggtgggctccacccagttcaagcttctccagctgctttgtttacctactcaagccttagcaatggtggacactcctacccctgccaggctgctgcctcgcaggtcagtctcagactgccgcactagcagtgagcaaggctctgtgggcatgggaccagccgagccaggcacaggatataatctcctggtgtgccatttgctaagacctttggaaaagtgcagtatttgggcaggagtgtcccatttttccaggtacagtctgtcacagcttcccttaactaagaaaaggaaatccccctaccctttgtgcttcccaggtgagacaatggcccaccctgcttcagcttgccctcygtgggctgcacccattgtccaaccagtcccagtgagatgaaccacatacctcagttggaaatgcagaaatcacccgtcttctgcatcgatcatgctgggagatgcagaccagagctgttcctattcggccatcttggaacagacagcactgaaattctgttaacactttggacgtctctctgatctgcaaacttgaggattgattctcagctgcctgccctttcctccctccgtgttaacaatcattccattttatctctctcttgttcttcagttttctcatttgacctgcttggactgtagattgctgtccagtgcacccatagcacctctaacctgtagtcacagagtaaaatattttactattttacaaataaatagaaatattagtatagagtggaggattaactaaggcatatggtttaatcatgaaaggctgaggcagtgtgaggagtcttgtgctttcaggaaaggcagaccacataatttggactcaataactagaagagctggataaatatttaaaatcctttaaaaaataaatctctataagactttagagaactgataagaaaagtgaagaatttcaaggctaagggccagtggagaatggaggatcagagtttggggcaaccctttccctgggaaaatctgctgaatttagagggtatagtggtgagtctaaaaggtactgtggtgtttttaacagtctcttgttgagaagagggaatagggactgaagtccagggtctgctaaggggatgtttgtaaatatatctcactttgggtctggctatctcaaggcttttctctagtagtaaaggttaactgaaagtagacagaccggctgggcacggtggctcaagcctgtaatcccagcactttgggaggccgaggtgggcggatcacaaggtcaggagatggagaccatcctggctaacatggtgaaaccccatctctactaaaaatacaaaaaattagccaaccgtgatggcgggcacctgcagtcccagctacttgggaggctgaggcaggagaatggcgtgaacccaggaggcagatcttgcagtgagccgagatcgtgccactgcactccaacctaggcaacagagcgagactctgtctcaaaaaaaaaaaaaaaaaagaaagaaagaaagaaagtagacagacctgtataggtatatagcttcaaataatctcagtacctgaaattgaattaaggtggttctggattgccagtgcctttaggcactggtagaagccatgtgaaaatcctccctgggagaaaataatatcctaagcatcactttttctgcactttggcaaatgtgggcccaacacacaataaaaaatagccaggtgcacaaagggacaaaattagttgaccaaaacccagcagaaacaacaaatagaaagagtcctaaagggactccagatattgacattatcagaaacagactttaaaataaatatgcttactttttacaaggtgttcaaaggcaagattgagtagaccttttaagaaattttttttatacagaacaggaagttaaacctaaagaaagaaggaactaataaataataaaaacaaaacttagtgcagtagaaaaaaaaatgcatgtagtgtaggaaagaccaagccaaaaactggttcttttaaggactaatcatattgataaactcttaatgagtttgagtaagaaaaaacaatgtgcagataatcatcatgagttttaaaaaggatttaattacaggacccaccaacataaaaatgctctcaaaatgctattataaacaaccttctgctccttagaagtacttcatttaccaagactaatctaagaagaaataggattctgaattttgctgttggagagctcaaattcataatttaaaactcccaaataacaccagtcttacagaaactcatccagagaataggaaaagagcagaagagcaatttgttattcggtttatgaagccaacataatcttgataataaaacctggtaaagatatatgagaaaattatagactgccctccttaaattaaaagcaaaatactttcatattaaatgaggcaatattttaataatacatcatacatcctgacaaatttgaatttattctaggaatgcagttttggcttagcaatcaaaatagatcaatgtaatttatcacattaatagaaccaaaggaaaaatcatttcatcattttgataggagagaaaacatttaacaaaattcagtatgcattcatgattttaataaaatgttctagcacactagaaataggacagtagtatgccctacaaaaaacctacagcaagtattatacttaatggtgtggtaggaactatcaaataacacacactataacctcttttattcaacattattatattcataatgatttactggagatcccagccagtgtaataaggcaagaattagaaacaaaagatttgaaaaggaagaaactgttttcttgctcaggtacaattatgtacatacaaaatccaaaagaatctacagaaaaattataaaattaatgtgagtatacctgatagctgagtataaattcagtatacataattcagttgtattttctatatggaaataacaaagatttagaaaatgaaattttgaaagaaattctatctacagtaccataaaaatgtcaaataccatggaattaatatacagacatacaagacacagaacacttttaagccttattgaataatattaaagattatctataaaatggagggacatatcatgtttatggattgggtagattcagtactgtaaagatatttcccctaaactgttctatattttaaatgcaatttcaatcaaaatctaacaggttctatagaacctgataagcttattgtaaagtttatagggaaatgtaagcagcaaagacagtcaagattgaggaaaaaacaaaagtcaaaaatgagatagactattttatctatctaatatcaagacttgttataagacagtgtgggattgatatgatgactgacaaatagacacgtgatatagaatagagagcctgaaacagacccacacacataaaagatagtgctgaaaagcaaggaaaaaggagaatgttttccatgatggtgctggaattagaggataattaatttgaggaaagaaaaatacttgacttttaactcacaccagacataaaaactaattccagatagactgttgatctacatgtgaatgacaaagcaataaaacttctagaaaatattttaggagaatgtcattatgaccttcatgtagcgattgaaggattaagatataagaagaagtaatcgtaaaggaaacatttgctgaacttttactctattaaaattaagaacctctgttcagcaagatacctgacataagtgaagaggcaagccacaaaatgggaaaggaaatatacagcatagccaggatatctaaagagtgattattaatcataagagaaataaataacccaaagaaaaacgggcaagagacttcacgaggcgcttcacaaaggaaaatatctagtgtccactaatcataagaaaatttgtccaacttcatgagtattcaggaaaatgcaaattagagccaaaccacacattcttcagaatagctaaaaagattaacagtagcaattgttactgagaatgtggagcattggaactcttatcctctggtgtcgggagtgtaaattgatgcaaccactttagaaaacagtagacattttctgccacagttaaaaatacacacagtccatgattcactgattctaccgttacatacctagttatcagacatatgtgcacatgtacaggagtgttcagtattattatttttaatagtgagaaacaagaaatagcacaaatatctatcatcaacagagtggtaaaaattgtggtatattcatccagtgggatactatatacaagtgaaaatgaaagaactatagctgcacacaacaatgtagataaatcttacaaacataaagttgagcaaaagcagctagacaccaaagaatataaatgawgtgatttcattttatataatatgcacaagaaaacaaacaaaattaagtagtagtgtgttttgggtttgggttttgtgtttgtttatttagtattactaggcacatatctgaaaaacattaatgtagtttgtttttgttttcagaagaaagtttgtttttttcctctatcccctccttgtttgttcaagaactcactgacttggtgttcaaatactttttggaagtggtagtatgggcttgtatatttacagtagcaaaaattaggtagtgctgtttagtagcacatgcttaagtgataaaattatatagaaaataatgtttgtgattatcccgtagggaaagataatggttacttttatagggaagagagaggttaacaaatgggacatgcaacagggatgcttctgcaaagttggcaaacaacagatttgcctgatctgagtgttcactttgtgacaaatcattgagctatacttttttaacttgtgtactttccagtatctctgttacatttcagcaatgcatacaagattaaacacacacagacaggcaagagatgctaataaataactaaacattcttatgcattagatacttttatccttttggttcccaactatgtcttactcccagggtcctctcagcagccttctctggttggccctgtaagcatcatcacatgactcagtttaatgacagctccaaaaatagcaactaccatttcataaatgcttactatatgccaagctttatagtagaagctttacacgtattatttactttaattcttacccaaaaaccctataaaaatacatactatttttccattttacaaataagaaaacctgtatcatggagagagtgatttgattatgtaatataattgtggagctggaagaatctgaatgttttgttctttctattgtatttacctgtaacagaaagcctgtgctcttttcactttgttcatctgctactctggaaggtttttaaaggttttgttctcatttcatctcactgattgagaaagagcaaagctcaagtaccattttcttatacctttggctgttccttttatacaacatccaaataacccaagtttaatatgcccactaaagattttcccgttcaacaatgaaattacattttatagactaattttacaagattttccatatttgcttaactatcttccaaaattttgcaaaagaatccaagatataaaatcaagagaatgttttactttcttttggtggcaggtagcattacagaataccagttttcaaaagccaatggagtatcatggtcaagagtacagcctttaaagtcagaaaaacctaggtttgagtcaacttttccaatttaggcctatgtgatcttggataaattatacaatgtatctaggtattcatgtttcgtggccataatgaagtacaatttaagccataggatgggatacttaggtaacacacaaaatggaactaagcactaaatagttacactttaggaggggccgaaagaccaggggcaaccacagagccttcagtgcagaaactcttctactagttctgggttctatcatcagacagctcacttagcttctttccagcctgtttgaacacccagctccccagagacagatattaattgctgattgatcatgggtcactctgtcatcaggggcagaacctgttatcagaagaaggagtcaaaaacacacttggcaaacaaaaacatacctataacacttggcctctcttagcctcactttcttcatctgtaaaattggcatgttcatttgtttattgcgaggttacagtatgtaaagtatgtaacctctgaaatatgtggtaacttttggtggcagtagtagtattagtagtagtagtagtagtagtagtagtagtagtagtagtagcagtggtagtagacgacttgtactgactagtagctctttgttgcaaggtgatctttgggttcaggacctcaggtggtatttttgaaggattaatagggatgttgtcaccctttttaccctgagctggctaaagagatagtcaaagtccccatgtacctataaggcttgtgttctcattcctctacaaaactgactgtgttctctaataactatatgatgggctgggagattaattttgcagtattttgtgatgtccakctcttcccctgcattttcactacttctacacgtgttcttatccaaggtgccatccatcttcggtaggcctctgcatacatattgtgactagtggagacaaagtgaggcactagagcctctggcattagttggcatatttccttgtccaagtagggaatctggcagtatcttctttttatatattattccattgctctcaactgcttcaggaaaattgaattatgttagtttttccaaggaaggaacagaggcccttttgtctgatgtgttggttaattctatatgtcagcttcactgggcgatggggtgcccaggtatttggtaagacattattctctgtgtgtctgtgaaggtgtttggtgataaaattggcatttgaattggtagactgagtagagcagattacccttcctaatgtgggtggccctcatccaatcaattgagggcctgaatagaacaaaaaggctgatcctcctgcaaataaggaggaactccatctgcctatcttctttgaactgggacatttgtttcttccttctcagactcaaccaaaatattgactcttgttgggtctgaagcctgctggctttcagactggaacttacactatcagctctcctgggtctcaggcctttgaactcaaactggaactacatcactggcgctcctggtctccagcttgctgactgcagaccttgaaacttctcgggctccattaacctcttttatatatagagagagatacatacacacacacacacaaacatacacacacacacacattggttgtatatctggagaatcctgattaatatacccgataaattcaaaacaaaacaaaacttgaaaaaaaaatttttcaggtgaatatttgttttttagcatctgagtttcagtccaaacagggaaggaaagagaggaagtgtcttcaaaaaatatagacaccccccaaaaatatattaaatcaataataatttagatccaagatgttattgatggttggagtatagaccactacccatacaaaaagcactgtaggaaatggagttcttcagagagtagaattgtggttaccaagggctaggcaggaaggcagattgggaagatgtggtcaaaggattcaaaatttcagttagagaggagtaagttgaagagctctattatacaaaatggtgactatggttaataacaatgtattatatcctcgaatattgctgagagtaggttttaagtattcttgccacaaataaaaaaaaactgtgtcaggtatgtgaggtaatgtatgtgttaattagcttgattcagccatccaatatatatttcaaaacatgatgttgtacaccaaaatatatacaactgttgtatatatattcaaaaagggaaaaaaagaaaatggagttcttaatttagcagatgatgcttaaattctttttaatctagaaagtatctatattattctaagatacaaaaattaaaataagaccagttggtctttactgtttttctcagttttaacaaatgtaatgcaatcttagcttggatcttctctgctcttttttcttcattttttctgtttaatataatagtatctctcactttcttaaatggttgtatgttactgctatgttctatggaacatctaccagagtcctgtccaattctctacccacccacctccacgtccatccctcagtgattccacattgaacatgagcaaagccattcttccggagtttataaaacccttcaagattattgaaaatgaatggtgttatataaatgtcatgttgtttcatagcagttcttaaaacaatgagataatgtctgttaaataattttaagttccatggagaaatgcagggcataaatacaagtcattttttattatgtgatttccatatatttttgctgtacaatttaaaacattataatctctaaagatataaatgctttctttgtgtttctatatgtrtgtgtacacacgtatatgctgcctatataaaattaataaataattttgttgcttcgttttgtcatttgggcccagtaaatttgtcaccataaatactggccagagaaaaattagaaatctaaagcagtttcttttagtattagacatagtgtttacttcttaactttgtacttgtgtattactgaaatttttttcttttctacttttattttaggttcagagggtgcaagtgcaggtttgttacatgggtaaattgggtgtcattgaggcttggtgtacacatgatcccatcccaaggtagtgagcatagtaccctataggtagccttccaacctacaccctcatcctactccccacctccagcagtctccagtatctattgttctcgtctttgtggccatgtgtattcagtgtctatcttccacttataagtgggaacatgcagtatatggttttctgttgctgtgttagttaccttaggataatagtctccagtgccatccatgttgctgcaaaggacatgatctcattctttttatggctgcatagtattctttggtgtctatgtaccacactttctaaatacagtccaccattaatgggcaccttggttgattccatgtccttgtctgttcttgctttggctctgagcttggttgttatcaatgtatagaaatgctactgatttttgtgtgtttgttttgtatcctgaatgtgcatttgtctttttggtagacacattgattttcttttggatatttacccaatagtgggattgctgggtcaaattgtagttctgttttaagttctttgagaaatctccacaatgctttccacagtggccgaactaatttatattcccatcaacagtattctatgcattcccttttcttctctcaggttcaagtgattcttccacctcagccttccgagtagctgggattacaggcacccgccatcatgcccagctaatttttgtacttttttttgtagagacagggtttcaccatgttggccaggctggtctcaaactcctgacctcaggtaatccttctgccacggcctcccaaagtgctgggattacaggtgtgagccaccacacccacccgtcatttattggcttacgtatattgaaccaaccttacattccagggataaagcctacttgattgtggtgaattaactttttgatgtgctgctggatttggtttgctagtattttgttgaggatttttacatccatgtttatcagggatattgtcctgaagttttctcttttcattgtgtctctgctaggctttggtatccgaatgatgctggcttcatagaatgagttagggaggaatccccgtccctcaatttttggaaaaggtactagctcttcttttaggtctggtagaattcagctgtgaatccatctagaccagggattttttggttggtaggcttgttttactaattcagtttcagaaattgttattgatccattcaagcttttagttttttcctgatcaatctgagaaggctgtgtgttttcaggaatttatccatttcttctaagatttccagtttgtgtccatagaggtgtctctaatagtttccaaggattttttgtatttctgtggggtcagttttaatgtcatttttgtcatatatgattgtgtttatttggatcttctctcttttttttctttgttaatctacctaggggtctatcaattttgtttaatcttttgaagaaccaacttttaattttattgatcttttttatggatttttgcaccttgattttattcaattcagctctgattttggttattcttctgctaggctttggggttggtttgctcttgtttctctaggtacaatgttacgttatgaatttgagatctttctaacttcttgttgtagctgtttagtgctatacatttcctccctacactgctctgtgttccagagattctggtatgttgtgtctctattttcattagtttcaaataattttttatttctgcctcagtcttattctttacccaaaagtcagtcaagagcaagttgtttaatttccatgtaagtgtatggttttgatacatcttggtatctatttcttttttattgctctgtgatctgagagtgtagttagtatggttttgatttttttttaatttgttgagacttgcttcatggcctagcttgcggtcagtcttagtgtagctcccatgtgcagatgagaagaatgtatattctggtcttgttgggtggagtgttctgtagatctctattaagaccagttggttaagcgtcgagtttaagtacagaataaccccttctcttttttgtcttccatttgcctggtagatccttctctttttactttgagcttatgggtaatcctacttgagataggtctcttgaaggcagcagacagttgggtcttgcttctttatccatcttgccaatctgtgccttttgagtgaggcatttagaccatttacattcagggtcaatattgatatttgaggatttgatcctctcatcatgttgttacctgtgtgttatgtagacttgattgtatagttgctttatagtgtcagtgggttacatgcctaagtgtgtttttgtggtggcaagtagaattcttttgtttccatatgtagcactccctttgggacctcttgtaaggcaggtctaatggtaacaaagtcccttagcatttgcttgtctgaaaaggatttcatttctccttcgcttatgaagcttagtttggcagaatatgaaattcttggttggaacttcttttattttatgatgttgaaaataggcccccagtcacttctggcctgtaaggtttctgctgaaaggtgttagcctgatgaggtttcctttgtaagtgacctgctctttctaattgtctttaagattttttctttcacattgagttagagaatctcatgactgtgtcttacatagcttctcactggggttctctgaatttcttgaatttgaatgtcaatctctctagtgagattggaaacattttcatggactatatcctcaaatatgttttccatattacttaccctctcttattctctttcaggaatgtcaatgaattataggtttggtgtttttacataatcccatatttatcagaggttttgttcattttttacattcttttttctttatttttgtctgcctgtgtggcttcaaaggagcagtcttcaacctctgagattctttcctcagcttggtctattttgttaatgcttctgttgtattttgaaattcctgtagtgaatttttcatatccagaagttcagtttggttctttctttaaatggttatttcatctttcaactctcgtatcagtttactgttttccttggattgggtttcaatcttctcttgtgtctcaatgagcttccttgccattcagattcttaattctgtctgacatttcagccatttcaatctggttcaaaaccattgctggggagctagtgtgattgtttggagataagaaaacactctgactgttagagttcccagagttcttgcactggttctttctcatctgtgggggctgatgttcctttatcctttgaagttgttttcctttggatagagctttttatttttatgatcttcattgtccttgagggtttgactgtggtgcaagttaggaaagttaaatgacttcgtttctggatgcttttggagggcgcgggctcagcttcacactcctgggctgcgtgctctaaccctgggtggctgggactgggtccatggctttgccctctcatctctcaaggttaagccccagttgggctgttggtgccagatgttctcaggctgctggcaacagtactctgttgagggtgctgtgtgcataagtgctctgatggaggtgccacaggtaggaggtgctgcagcaggggtgcaaatgtacttcaaaggggcagtggcaggtcagaggtgaacactttccagcaggacgctgtcagcaaaagtgctgaggtggggcagtgggggactccagtaaaagcactattgtggtagtcactggcgaaagcactctggcaggatatctgaggctgtgctgcattcagacatggccaagaccagactctgagaggggccactggacaacaggatgtacagatcagacctgtctcagcaggactgggaaagacagtcgggctccctccaggtccaacagcttacacagatcacagccaccccttccttaggagccattaagggcttgagatgcatctcagcactcagcaacctcatgtggggtttccagcttcctccctcttcagtcctggtgtctgagtcatctctctaacctctctcggtgcatctgtcagagggtctgtgtggactatgctagtttactcaatattctggtctgtctcaatgggagaggtttttcctggctgtatctagtcggccgtctttgttctatttctcccagttgacatctgaattttttaaaatctgtattcatgctatatattgatttactgagttttgaaaagacttccgtgaggtcacttctttacaaatatttcccaatttcatttttctaactctagcttcaagctaacattttcarctctctttttaaagtttccttaaaaccagtagcgacccaaattaactgtattttcttcttcataataataattcccagacctgaatccctactactattactagttgtaccactctttttccaatcagccaaattaaatttttttagtgtcatctttggcttctttcacttttttgctatccctcatccctacccttatagacaatcttatacactttttacccacttcttcacttctgttaactcatccattgctctaactgcatcactcaccatctcttcctaaaatactgtaattaattcctaattggtttccttgtctctggtatatccctattccagttagtcttatacatgtggagttaagatacatcaacctaggttttactcccagcttcatctcattctagttgtttccttgggatatttacttgaactctctgaacctatttctttatcttgaaaataactacctcatgggttgctatcatatttcactaaaatgatatattgttctagtctgtactttattgatttcatggtgcaagaacccttcaagctagcttatgtaaaggggagattcttctaagcatgcattggaatctcatgaataccaaaagacagaaaccaaagagtagaaatataaaatgtgatcagaatctgagactgaactccttgcaaagctatgtaatctacgtctctgtttgcatctctgattctttctgtatatctgcagcagcctcttccttctaacggcagtcttcttttatcctcctatagaattctgtgtagctcctggtgtcaaattatcaccccaaatctaaatgtgcacatccttttgctaccaccaactagttcatatttccaagaaaggaatccaattggcctagctcatattttgactggctaccacgttatagtccctggtgagcacacatggctcatgtgccacccttggccagcttctgaggctaatagagggaacagcagttatggacaagaaagattccattagaagtgagtatggacaagctgttaatgattggcatatatagaaattttatgtaaagcatttagcatagtgctaatgagtggtagttattatttttatataccgaaagaaactaaccaaagttattttgatgtactctttccctctctgtctttcttagacacacacacacacacacacacacacacacacgaaaattcacaaaataaagaaatgtgtagttagcaacatgggcttgaagtcatctaatatgagttaaagcaataaatctgttatttaaaacatatgtgatcttggacaaattatatttttcctaacctttagtttctttatttgtaaatgggaatgatattctgtcagttaagaatcttacagtttcaaatggctaatcaggcttatgctgaaaagattacactggggctacaggtagaactgatttcaggcacacctttgtcagaggctaaaatgatgtcaagtagacctgaatttcctctttttgtctgcatcacttgattctgcttttacacatcttcacccaaacctccacatacccagccttatttgttccattctgagtcatgctttccctttcatgggtttgaatagtcaaagcaactcctcatgtcttcccagattctaatccagtagagaagaatgttcgccttagtcctagaggtctcaacaaaaatctcttagcatctcattgttgattattctatcatgtgcctatttctgaatcaattactatagctgggaaattaaaggctcttattggccagtgctgagtcacgtgccatttatcaagccaaagatagaggcagcacgactagagtcacgtggaattagggataaagggagaggtgtgttcatcacaatggtaataccaactttacatgattttcagaaggattaaatcagtttttacatgtatacaaagtcctcaagttctgcagtaaaatctgtatttcaagtcttttcctccattacttccccagacagattccatattctccccaatctattctgatgggtccttgactatactcccaccctttcttatgtgtgtcatgttgcttttgtgattccattggcctgagcaccttctactatttttgcttatgggatttttgtccttcatgtaccatctcaaacaccttcacctcatgaatctttcttaaactaccttagatcctatccaaaatcccacaaaagatatggttgctgattcttttgaaagatgattcaccaatcttcagttctagctcccagcatcagacatacattttaaaagacatttttctggctatcccagtgaactttctttgctacttaccacattctgccttgtattaatcttctgcatcaatctgtatcataaactctgaaggctcacaataagtatttcattgaattaaacctaatttcaactaaatacacattatttatgaaattttaaacccctatattttactcaagacaaaattttaaccttactttaataaggaattttataaattcttgactctcatatatcttagatatttaatactgatctagtaagccaaacatatagccaattttcagtaatccacaatacagatttcagtcatatcagtaagacctattttgcccaggcttgcttgctgtacattaggattttgtatttgactttctgttaattaatccatatttattgaatgcttactatattatattctacgcatttttcaaggcacgagaaagtatctattctccttccagcaggcttggaatgaattcagtcaatgaagacgtaaataaaaaatgtaatgttaaataatggcaattctagtttttagttgccagaatgtatgtttgttggtttatgtgtttttaaaatctctgtgttgtaagattagtgttggaaaacacattattggggcagacttcaaataaagagaaaaaaaaatactactttcttcccagacagtgctatttcagcttctttaactttcctactatgagcaggtgggttcctttagtttgccctgaaaatcaagaagcattcctaaaaactgttcctaaacaatggtgagttttactatgtaatagcaatatttatggaaaattaaacttcaattcagtttgttctattaggtggttgcaaaagtgaatagaattctttaaatagttattatcatcactagtttaaaataatgcatttaatagaatgtgtatatatcatcacaaatgtacatatttctaatccagatttaccatgtgctatatttttttaaaattcaggttttagttgaggttgatgtattattatttgtgactttatgggaaagctgaaaaaytttagttcaataataggattccaacagtttcagaacagttacatcatttagtaaatctggcaagtattctactaaaatagggaaaaatcaagagtttactattatttacatcaccaattttaacttagataagtatacattacattactaaactctcaaagctgaataaattccactatagatggtgacgtttatattgttcattctccagatggcctctctgtgccaggcattttccatgccttacttctccagtgccagccctgcctcctgcccctcttcttcacagattgcctcatccttacttttctgaaaaggccatataacatgagcttcttcagctttactcttctctaccaccaaacttctgtttccccacacatttctccagcctgtcttttgtctcagggcagggtgcctagttcttcttaaggctaatcacccaccccactttccacatcttcaggaactttcccttctccttcttttgcaaaagtctgtctgtatcctcttgctttttcccctctgcctcacccctgctcatttcttccctgacctcaaagaatttttttatccttgtgtctgtgtgctcccttgcaaactctgccttccactattaaacctactgctgaagagtagtcccaaatcattgtccacaactcctaatcatttctttggatttctagattattaacttctcaaccttaatgaaattgttcttttaaaagtcagcagtcagccgggcacggtggctcatgcctgtaatcccagcactttgggaggcggaggcaggtggatcacctgaggtcaggagttcgagaccagcctggacaacatggtaaaaccccatttttactaaaaatacaaaatttagccaggcatggtggcaggcacctgtaattccagctacttgggaggctgaagcaggataatcagttgaacacgggaggccaaggttgcagtgagctgagatcgcgccattgcacttcagcctgggtgataagagtgaaactccttctcaaaaaaaaaaaaaaagtcaacagtcacccacattcactgtgtttcctcagtctgcatattcccttaaggaacttgattctttttcttatcaccattgactctttaagcttacaatgtagggatctcagttgcttctctgaaatacatttttttactcttcaatagcagaaataaacagttgaaaactcacttaagtatacaatataatgttagataatgacaagtctgcttggttttaattgtcaaaaagttttcttcttcttttagcaatctctgtgttgcaggctaaagacttcaaataaacttaggggaaaagtcataatttaaccacttccttagtgatctgagaaaatgccttttcaggatcttaatttttttattctttgtaagtaagtgggaaaaaagccaagtgcacaacaaagtgtgacacacacacacacacacacgtttgcagaaaaaccatgggaatgataagccagaaaataattaagttgcttatttttataaggaatagcagcatagagaagaggtagaagtgatagggaggcaatgatacctgagtttatctttttttgtagttttgtcttttaaaaatgtattcctgttctaaatattttagaaattaacaagcatggaaaggaaagagaaactaaaactgaatgtaagtagaaacaaataaatccaagtttgtttcaaataagtaatgttacactgctgggaggtaaaagaaaaaatttgattatgttattccacaagggatgtggaaagaacagtaaacaaatcttgaacttttctcagtaggctttgtcttttttttttttgtagtactatagacatactaattataaaactattttatgtatatggtaaagtttagttagttaataatacatgtgttgatgttgtagggagccaaggttctcattatagaagaaaggagataaaaatgtggaatgagggaagatgaggaaaaacttttgggaatggattggtatatgtggatggattgggtttgaatgaacttaatgatttcttaggcatatcctacctctgactgctgaagggacttaaaagcaaagaatcagtggcaatgagtacatttagcacccagatcttggtttctaacaccatttccctctgaaaggaaccagggtaatttgaagaaatgactgattcccaagaccagaccacctgttctacaaaaaaagaaaggggggtggggagagggcggaagagtgctcctgaaaatgatggtggcacatcaagacaacctagaagccatcttgaaagggcctctcctccactgttaaatctggaattacttgggtttcagataattgagaacacacaactcaagaataaaaagataatgcaatttttaaattggcaaagcatttgaatagacatttctctgaaaaagatatgcaaatggacaataagcacatgaaaaatgctcagcatcattagcgatcagggaaatgcgaatcaaaaccataatgagatattatttcacacccagtaggatgactataatttttttttaaggtaacrgaggaaccaacaagtatgggcaaggacgtggagaaattggaaagctcatacattactgatggtattgtaaaatggtacaactgctttggaaaaaaagtttaacagttcctcaaaaacttcaacataaaattatcatatgacccagcagttacactcctagatatataccaagagaattgaaagcaagtgtttaaaaaaaaaaaaacttgtacacaaatattcacagcagcattattcacaataaacaaaaaagggaaacaacccagacaaaacagcctaaacaaactgtgatgtattcgtacagtgaaatattattcagccatgaaaaggaataaagtactgattcatgctacaacatggatgaagcttaaaaacattactctacatgaaagaagccagaatacaaaagaccatgaattatatgattccatttatatggaatgtccaaaataggcagatccaaatttgtagagaaagaaggaaagtaagtatttgccagggaatgcagaaaaatgagaagtgggactgattgctaatggtatttttgctaacaggtagtgtttttttttaaggggtggtggaaattttctggaattatagtggtgacggttttacaacattgtgattatactaaaaatcattgaattacaccctttaaaatggtgagtttcatgttacgtgaattttatcttgataaaaagtgcaaaaaacaatcattgaaaccaataaaaaaaatttgaactattgggtagaaaaataggaattcatgaatccatgaggatctgaatgaatgaatgaatacttagaagagaaggaaagtctccttacagtaagataacaaacaataaatgtgaagagagtggtggaattggaaaatcaccattgtcatagtaaagattagtttgggcaaaaatgatcaatagatactaaatctagagggaatgctggatgaagaacagtatattggcatgatcacaaactgtctccccactaattgcttattagttgcacactgatctgtaatagagaaaccgtaaaacaccttgactgactgatcagaattaacatccacaatgagaagcgtatggacaccatatgtctcttaacagtaccctgagaagaacatacaatcacttgtgtgttctgcctagggctgcataacctgactctaatcatgagacagcatgagacaaaccaaattaaggaatattttattagaaaaacaactgtcttgtattcttcaataatgtccatgttgtgaaataaaaagaaaggcttaggagtctacagagacatcaaaactaaatggcaatacatgctcctggactggatcctggaacaaaggaaaaaataatactaaaaaggacatggttggggaacttgacacaatgaaatatggatggtgtagtaaagtattgcatcactatgaaattttctgaacttgatatacctgaatttgaaatactatagttacttaagagattattcttgttcttatgaaacacaaactaaagtattaaggagtaaagggccataatatatgcaacctagtctcaaatgattgagaaaaaaattaatatatatttatgcactgggagagagaataataaaacatgtggcaaaatgttaagaactggtgaatttaggtagaaagatatgagtttttaatattattctttaacttttctgtaagtttaaaattatttcaaaatagaaatattaaaattagtttttaaaacttatttaaattgataaactcttttttttacatttttcttttttatcttataaaatattttaaacatacagaaaggtaaagggacttaacccatttttttacccaactaatcttaattttttttacattttttaaagtaaatctaaactttacaaatatagcttaagtcccctgtatactttccaattttatttctcccccttcccaaaactactcacgactcagaagtatgtttccttcctgtacatgtttttaatcctttattgcatgtgtatatagccactaaaaataataatattgctactatgccactctataaaagtggtatcaaatggtatgtatccaattacaccttgtttttttatcattatgcttttgacatttgtcaatgtttttatgtgtagtacatatttattttaaatgatttatagtagtcattgaatgcatattccagcttttctcctgttcatggacattaggttccttttatatatttcctattttaaacattttgcagaaagcatccttgtacacttctgtgtacacaaacaagagtttctttagggtacgtctttaactggaatagctgggtgtgggtagttatcgtgattatgatacataatgtttactaactctcctaagtgatttatatgtattaatttatttaatctttaaaacaataagtaaacactattattattaacattttactgttgaagaaactgagattattcttgttcttagggtggttaaataatttgtccaaaatcccacaggtagaaaatgtcagagccctgattcaacagatgtaacaaacctgtagagtgtatgcacaccttcaactcctccagatattgccattttgttttccaaagtggttattaccaatttataatctcaatggccaataggactttttttttttaattcttaacttgtaaaattaaaaagcaactcatccattaaattttgtttgggatgtttacagacctctaaaatctaaaagtctgaaaaccacttccttacatggcactgtttagaggaacatggtttatagaatcataaggctgaaatcaccacttccttacttgacattgtttagaagaacatgcttttacaggattatagggctgggatccttggtctttaaaatgcccagctataggaggttttcatgaattcctctggatccaaacagttcaatcaaccatccaggctttataacctttcattgttcttgtctcttcttcacctcttccccaatctgccattcccaattctttactctgtcagtattgctatattcagccaattggcaagtcttatttactcacccattgtagaatctctcatctgtcctattctagttccaggtttgtatcacatccttttttgacagtataataaaaaacctaaactgatctttttctctgaaatctcccagaagtgattcatctatacactgctacttaagtgatcttcttaatatagttattttattattcctcttttcacaaacctttagaactgtcttattgtatattaaattaagtgtaaaattatctaatcatctatgatttttctccataatcttgctttcaagttgttgaccatcttatcctctattactgcctgtattctatcagtggaacacagatagatcttgggtaaaatggaagatttttcaactcttacattttcagatggtgctgatactgcagatccagtctgggtaacacactctgagaattgctgctctagttgatctgtaggagctggcatagggtcttataaattagctgatcatgatatatatttaatagaattaaatcccatttcttaaggtttagagaaactgactttccacactattcaatccagaagagatagttacttttagttttgaaaaaagttttaaacttgcagaaaacagtacaatgaactcatatatcttttacctcgatttgccagtcatttacattttttaatatttgcacattgcattgctctctgtatgtttgtatacatatgtacatacatttttctttctctttttttttttttttttgagacggagtctcgctgtcacccaggctggagtacagtggcgcgatctcggctcgctgcaacctccacctcccaggttcaagctattcttctgcctcagcctcctgagtagctgggactacaggcatgcaccaccatgcctggctaatttttgtatttttagtacagatggggtttcaccatattggccaggctggtctcaaactcctgacctcataatccacccacctctgcctcccaaagtgctgggattacaggcgtgagccaccacgcctagccacatgcatacatttttctcttgaactatttgaaggtaccttagtgataccaggtctttaccctaaatacctatgtgtatatttcctaaagaaggactttctcttatataaacattgattgacactgttaagtaatttacaaagtccaaattttgtcttttattctaataatgtccttcatagctgttattttttcccattccaggattcaatccaagataatgcagaaagtatagttatagagagatgttttgagattatgtaaatatatcattccttatcaagctttcacccttagtttttttgttttgttttgttttgtttgtattatactttaagttctgggatacatgtgcagaacgtgcaggtttgttacataggtatacatgtgccaccatcgtttgctgcacctatcaacccatcgtctacattaggcatttctcctaatgctatttctcccctagaaccccacttcccaacagaccctggtgtgtgatgttcccttccctgtgtccatgtgttctcattgttcaactcccacttatgagtgagaacatgtggtgtttggttttctgttcctgtgttagtttgctgagaattatggtttccagcttcatccatgtccctgcaaaggacatgagttcatccttttctatggctgcatagtattccatggtgtatatgtgccacattttctttatccagtctatcattgatgagcgtttgggttggttccaagtctttgctattgtgaatagtgctgcagtaaacataggtgtgcatatgtctttatagtagaatgatttataatctgttgggtatatacccagtaatgggattgctgggtcaaatggtatttctggttctagatccttcaggaatcaccacactgtcttccacaatggttgaactaatctacactcccaccaacagtgtaaaagcattcgtaattctccacatcctctccagcatctgttgtttcctgactttttaatcatcaccattctaactggcgtgagatagtgtctcactgtggttttgatttgcatttctctaatgaccagtgatgatgagctttttttcatatgtttgttgtctgcataaatgtcttcttttgagaagtatctgttcatatccttttcccactttttgatgaggtcatttggttttttcttgtagatttatttaagttccttgtagattctggatattagcccattgtcaaatggatagattgcaaaaattctctcccattctgtaggttgcctgttcactctgatggtagtttcttttgctgtgcagaagctctttagtttaattagatctgatttgtcaattttggctttcgttgccattgcttttcatgttttagtcatgaagtctttgcccatgcctatgtcctgaatggtaatgcctaggttttcttctagggttttatggtcctaggttttacgtttaagtctttaatccatcttgagttaattcttgtgtaagatgtaaggaaggggtccagtttcagtttcctgcttatggctagccagttttcccaacaccatttattaaatagggaatcctttccccattgcttgttttcatcaggtttatcaaaaatcagatggttgtagatgtgtgacattatttctgaggcctctgtcctattccattggtctgtatgtctgttttggtaccagtaccatgctgtgttggttactgtagccttgtagtatagtttgaagtcaggtagcatgatggctccagctttgttctttttgcttaggattgtcttggctatacagcctcttctttggtcccatatgaaatttaaggtagttttttctatttctgtgaagcaaatcaatggtagcttgatggggatagcattgaatctataaattactttgggcagtatggccattttcatgatactgattcttcctatccatgagcatggaatgtttttgcgtttgtgtcctctcttacttccttgagcagtggcttatagtcctccttcaagaggtccttcacatcccttgtgagttgtattcctaggtattttattctctttgtagcaattgtgaatgggagttcactcatgatttggctctctgtttgtctattattgatgtatagtaatacttgtgatttttgcacatttattttgtatcctgagactttcctgaagttgcttatcagcttaaggagattttgggctgagatgatgtggttttctaaatatacaatcatgtcatctacaaacagggacaatttgacttcctctcttcctatttgaataccctttatttatttctcttgcctgattgccctggccagaacttccaatattatgttgaataggaatgatgagagagggcatccttgtcttgtgctggttttcaaagggaatgcttccagcttttgcccagtcagtatgatattagctgtgtgtttgttgtaagtagctgttattattttgagatacgttccatcaatacctagtctactgagagtttttagcatgaagggctattgaattttatcgaaggccttttctgcatctattgagataatcatgtggtttttgtcattggttctgtttatgtgatggattacgtttattgattcgcctatgttgaaccagccatgcatcccagggatttagctgacttgatcgtggtggataagctttttgatgtgctgctggatttggtttgccagtatcttattgaggattttcacatcaatgttcatcagggatattggcctgaaattttctttttctgttgtgtctctgcaggttttggtatcaggatgatgctggcctgataaaatgagttagggaggagtccttctttttctattttgtggaatagtttcagaaggaatggtaccacctcgtctttgtagctctggtagaattcggctgtgaatccttctggtcctggcctttttttggttggtacgctattaattactgccttaaattcagaacttgttattggtctattcagggatttgacttctttctggtttagtctttggagggtgtatgtgtccaggaatttatctatttcttctagattttctagtttatttgcatagaggtatttatattattctctgatggtagtttgtatttctgtgcaaccagtaacgatatcccctttatcattttttattgtgtctatttgattcttctcttttttcttctttattagtctggctagtggtctattttgttgatattttcaaaaaaatccagctcctggattcattgattttttgaagggttttttgtgtctctatctctttcagttctactctgatcttagttatttcttgtcttctgctagcttttgaatttgtttgctcttgcttctctagttcttttattgtaatgttatggtgtcgattttagatctttccagctttctcctgtgggtatttactgctataaatttccctctaaacactgctttagctgtgtcccagagattctggttcattgtgtctttgttttcattggtttcaaagaacttatttatttccaccttaattttgttatttacccagtagtcattcaggagcagattgttcagtttccatgtagttgtgtggttttgagtgactttcttaatctggagttctaatttgattgcactgtgctctgagagactgttatgattcctgttcttttgcatttgctgaggagcattttagttccagttatatggtaaattttagaataagtgtgatgtggtgctgagaagaatgtatattctgttgatttggggtggaggattctgtagatttctattaggtctgcttggtccagagctgagttcaaatcctgaatatccttgttaattttctatcttgttgatctgtctaatattgacagtgaggtgttaaagtcttccactattattatgtgggagtctaaatctctttgtaggtctctaagaacttgctttacaaatctgggtgctcctgtattggttgcatgtatatttaggatagttagctgttcttattgcattgatccctttaccattatataatgcccttctttgtcttttttgatctttgttagtttaaagtctgttttatcagagrctgggattgcaatctctgctttttttttttttttttttgctttccatttgctttgtaaatattcctccatccctttattttgagcctatgtgtgtctttgcacatgagatgggtctcctgaatacagcacaccaatgggtcttgactctttatccaatttgcccatctgtgtcttttaattggggcatttagcccatttacatttaaggttaatattgttatgtgtgaatttgatcctgtcattatgatgctagctggttattttgcccattagttgatgcggtatcttcatagtgtcgatggtctttataatttggcatgtttttgcagtggctgataccggtttttcctttccatgtttagtgcttccttcaggagctcttgtaaggcaggcctgttggtgacagaatctctcagcatttgcttgtctgtaaagcattttctttctccttcacttatgaagcttagtttggctggatatgaaattctgggttgaaaattcttttccttaagaatgttgaatattggcccccactctcttctggcttgtagggtttctgcagagaaatccactgttagtctgatgggcttcccattgtgggtaacctgacctttctccctggctgcccttaacattttttccttcatttcatccttggtgaatctgacaattatatgtcttggggttgttcttctcaaggagtatctttgtggtgttctctgtatttcctgaatttgaatgttggcctgccttgctaggttggggaagttctcctggataatatcctgaagagtgttttccagcttggttccattctccccatcactttcaggtacaccagtcaaacataggtttgatcttttcacatagtcccatatttcttggaggctttgttcgttcctttgcattcttttttctctaatcttgtcttcacgctttatttcattaagttgatttttaatctctgatatcctttcttacgcttgatcggttctgctattgatacttgtgtatgcttcatgaagttctcgtgatgtgtttttcagctccatcaggtcatttaatgtcttctctacactgtttattctagttagcaattcttctaacctttttgtgaagttcttagcttccttgcattggtttagaacatgctcctttagctcaaaggagtttgttattacccgccttctgaagcctacttctgtcaattcatcaaactcattctccatccagttttgttcccttgctggcgagaagttgtgatcctttggaggagaagaggtgttctgatttttggaattttcaacctttttgtgctggtttttcctcatcttcctggatttacctacctttggtctttgatgttggtgaccttcagatggggttgtcttgtcggcgtcctttttgttaatattgatattgatgctattcctttctgtttgttagttttccttctgacagttaggcccctctgctgcaggtctgcacgaatttgttggaggtccactccagatcctgtttgcctagttattaccagtggaggctgcagaacagcaaagattgctgcctgttccttcttctggaagcttcatcccagaggggaacccgccagatgccagctggagctctcctgtatgaggtttctgatgacccctgctgggaggtgccttcaagtcaggaggcacaggtgttagggacccacttgaggaggcagtctgtcccttagcagagctcgagtgctgtgctgggagatcgctgctctctttagagccagcaggcagaaacatttaagtctgctgaagcagcacccacagccgctttttccctcaggtgctctgtcccagggagatgggagttttatctataatcccctgaatgggaccgctgcctttctttcagagatgccttgcccagagaggaggaatctggagaggcagtctggctacagcggctttgccaagctgcactgggctccgcccagtactaacttctggtcggctttgtttacactgtgaggggaaaaccgcctactcaagcctcagtaatggtacacgtcccttcccccaccaagctggggtgtcccaggtcaacttcagactactgtgctggcagcgagaatttcaagccggtaaatcgtagcttgctgggctctgtgggggtgggatccactgagctagaccacttatctccctgacttcagccccttttccaggcatgtgaacagttctgtctcactggcattccaggtgccactggggtatgaaaaaaaacctcctgcagctctgtgtctgcccaaacagctacccagtcttgtgcttgaaacccagggccctggtggtgtaggctccagagggaatcccctggtctttgggttgcgaagactgtgggaaaagcttagtatctgggctggagggcaccgttcctcacggcacagtccctcagggcttcccttggctgggggagggagttctctgactccttgcacttcccggtgaggcagcgccccaccctgtttcggctcaccctccgtgggctgcacccactgtctaaccagtcccaatgagatgaaccagttacctcagttggaaatgcagaaatcacccgccttctgcattgatcttgctgggagctgcagaccagagctgttcctattcagccatcttgccagctaccacctgcaccttagttttagtattcaccagtgattttctacttccatcatttcttttatatttatagttttgcattccactctaaaaaagggctttcctttgttctccatttatttattatgtcaatataaactcttggaatcttattttatgagtcacagtctgcttttaccattatttcttttgatgctcaaaataaattattttatttcatttttacttggccagtgggagctccttgaagctggctttttctttctttctttcttttttttttttttttttttttttgagacagtcttactttgtcgccccggctggagtggaatggcacgatcttggctcactgcaccctctgcctcctgagttcaagcgattctcctgcctcagcctcccaagtagctgggactacaggcatgtgccaccatgcctggctaatttttgtatttttgtagagatggggtttcaccatgttggccaggctggtcttgaactcttgacctcaagtgatctggcccatgttattttgatatgttcctattatttgagcacttccttgttttctgatttaacaagctgttctaggtttatattatagtttatttcccaagcccagaaatcaccctttttcctaaggagctctggtttctttaagaggaaaatcatatttagaaaatcaagatctgggtgctagattgctcaatcctattgcttctaggctctctcagtaaacagctaaaagatatactggtagtctaagtacagtaccatactgcagggcacattttagtctttgcccctttccatatttaactttgttctccaatagtgagaatacttgcttctttgctactttttttattcaggcaaatatattatttaaaaatttatctacatatttattacagaaacatatttattacagaaatataaaacatttattacagaaaatataaaacatttattacagaaaaaatttatcataaaacaaaaagaagaaaataaaatcacctttattctcacctaacaatagccaccacagaatatacttccattcctttttattttctgaacatatgtgtatagaagtatagaaatcatattttttacactttcattttttaaatgagattggacgttaaattgctaaatgtaaaatcttacacttgtgaggtgtttttgcccctctgccacactatcaggagtatgatttcagagaatcctgctatatcagatagatatgggcttcattacttgctccaatttggaggctgagaaatcttgggcaggtcatttctgagcctcagtttccttatctgtaagatgagagtaataataaataaataaatttattatattaaataatgtacaaaaatcaccaattatagacttcttggcatgacaggcagtcagcaaattataactattttgcagattatcaaagcagttatttacatgagtagataaataatttgttaataaatgttacatgttgaatatattatatgagattaaagcatttttgagtgcaggaagtgctttattttatactaataaagaaaaatattgcctgggtgcaatggttcatgcctataatcccaatattttaggaggctgagacaggagtatgcttgaggtcaggagttcgagaccagcccaggcaacatagtaagacccccgtctctacaaaaataaaaataacaaaatagccgggcatggtggtatgcacctgtagttgtagctactcaggaggctgaggtgagagcatcacttgaacccaggagttcaaggctacagggaattatgattataatcatgccactgcactcaagcgtgggtgacagagcaagaccctatctctttaaaaaaaaaaaaaaaaaaaaaagataaaagaaaaacattgcaatagatctctttaaaataaatggccaatatgaaaacacacatatatatgtataatatatttaaggcaaacctggatgtaccccctctgcatataaatccataaattaggaatcacagttttatacgcaccaaaagattgatgaatacatgtgttattttctgtcagaatgtgcttggtcagcctgtttttagcttttttgcttgtaacgagtaaggaaaacattggctttccacagtcaaccaaatatttgttctgctgctacttactcgttactgtagactaaataatttttcttgccttgagcagcataaatatggctttactccggactttagacacttcagctttaattttatgcctgtgcatataatgccacatgtgtgcctgtataataaaattgtaaatactttatcttctgttgtrtggtgaagaggctcattgtactcaggtatacaaaaatgattccagaagaaaaagataatgatatctgctaaaatgaatggggagaggggagaatgctggcatggaacatagaaatataactctcctaaagaaaaaagcagacattgaaagtcttaaatgtttaaaacagggcatcaggtatgcttttcaataaaaactggtgatagcagtggtaaaatgtttcatcagtatgattatactcctaggtgaaaaaaaagatggagacaagggaaaaaatgaagttaacgaataaaacaaatgttatttcagatcacggccckgtgtgtgttactaaggaaagatataaggatttataacatatatttgttttccatttatttttatgaaggaattaaagaaattatcagaaaatactaaaagggaacaaagcattttaaaaacattccaacaatggcatgctgctttttatacagtatgcagtgaagttccttgcatttcaaaggcaagggtagctaaatctgcctcagccccttagcgttctgtactacccttatcttgccatttacaacatgaaagtataataatctatttacatgctggtatataccactatgagtttctgacaaacatggcacatcttggtggtagttcatttattctacaaatacttattcaatgtctactatgtgccaggcacacttttggacattttggatacatcaggtaagaatataaatacctctgccccatgaaccttacattctacctatattgcaaagttcctagcacatygtagatttcttctcatggtcataagatgtctgcaccaattctaagcatcacatcttcatagaaaagcatccaaaacaggaaggaaaaattagaagcaaaagggctttctccttttgggcctttcttttcataggaaagaaaatctttcccagaaccctcaaacatgtgatctggaccaaacactggctggcaaagagtggaatttcttaagtctgagcaacaagaagaaaaccgttaccataactaccaactcacctgcatctgtgccatgtgcttgcctgcccacctataactaaggatgagctgtttgtagtcttaggtcaactcctccacttgtgccttggatcctgccgcacgcccccatcacctacttgcggacattactccaacagttcttttctttctgtcctgtattatcaaatttctgttcttactggattttcatgctctttcatcattatgaaagcatgcagtaatttcttcattaaaaaaaaaaagtatatcttgtctccacatccccctctaactactgtcctttagctctgcttccttttctagaaaaaaactccttaaagaaatatacatgcttgtcatctccaattccccttttcctgtttactcttaaatttactccagttagacttccgttcacacacaactgcttagccctcttaagtgacctattaccagattttacactgttggtcactccctcctccttgaattattgtttacttggcctctagttttttctctcttatactaaatttatttgaaaacatctttaaatctcatggatttacatatcatctattgctaataatttccaaagtgtttaacatgcatctgaaacttaacatgtcccagattaagctattgatcttatatttcaaacctgctcctcctgaaatcatccctgtctcagttaattttggaatcgttttttgttcccctttcttttctaccccatcaaattgatcagcaaatccaggatctgtaggccaacaatttccactggtagtacctggtcagccacaatcatctcccgtgtagattagtgcagtcgtttcataattgatctctttgtttctacaagtgacctctgaaagtctattctcaacatagtatccaggatggtcccttaaaaatatggcagatcttgtcactcttttttttaaacccaccaatggatttcttaaaagttaaagcctctaygtttgtctagtagactctataaaatctgtactctctccccttctgtttacctctctgatctcatctccttatacttctctctcattcatgctgttctaggcacagtagcccctttgcttatctgagtacacatttggcatgttccctgcctcagggccattgctcatgctgttaccttttctggactgtggttcctccagatgttcacatggctcattcccttacctctcaggtattttcccaaatgtcaccttctcaatgagactttctttgaccacttctacctgacactcccaaattgttcttctccactttgttccttgtgttactaccttgtaatatactatatgtcttattaatttgttgtttgttttctgccttccccagtaaaatttttgtccgttttctttattgttgctttcctaacacctataacagtgtttgacattctccaaaataaaattggaggctgaataagtgaaccaatgaaagatgaactctaaaaggcttaaaacatttataatacatcctttgatactgagcattaagttgcctaaaccacttctccttttgttaacaaaaaagaagatagaagaattattacttgggcagtctactgtgtctaagttcatacttgtgaaaaacttattttttcccctgccttttcctctcatttctctctgacaagagcccatgagaaaggtaggataacaggtattttgcacaaagaagttgtgactcagagaagtaattgatgtttccccaagagcactaacagagctgataggacctagattgcctgacagcaactgtagtcctctttccataatggtaacagtcaatatgaagtatgatattttgtagaatactgtataatccttcatgtgagcttagagacgaaacctaccttcagaaaagtgattatgaattgacgttagtggggttttttaacctgtcatttgaatgaaaaagaaacttgctgcatatttaagattctgggttttttctatatcttgaatcaaccaactttcataataattgataagtttgttattgatatcktatttactgccagtatattcttttaatagagcagaatagagaatatgttgctttgctatcagatttctccacattttgcccacatcattcccatcttttcccaaccagaagttatctcctccagcaactgtttaagccaaaarcagtcaaattactcaaaatgctaattagatttgtaatttttaatcaattgagtaaagtgaggaggcatgattgttagcattttgttaggtgatagaaaaagatatttgtaaactcttttacctagaaggaattctttaaagtagccaggtgagctaagatgctagtatattagctatgtacatatacagagacatataccacaaatgtgtacacattatgtaatgcatatagcaaataatatatctagcactaaaactatattgaatgcaatttattctctttgacatttcaaaatgcatttctagattttgtggcacctttggtagataccagggacatcacttatcattgcattgtggataaaatagatgtgcatattcacaaaacttggagaatagtgtgatgggcattcagattcactgttcagtgacaaaaagactggctaccttcatgttctaaatggaactagaagatggagcagatgaaggcagatgagttattcatctgggccttaagaatgaatacatctatgttgagatgtttatyaatgaaactactgtttccatttacccrtattagcttttccagttatagaaaattacctgtcaagttttacttctttcctgtaattagacaatttcttttccatgtgctttttatattggcatcctaggttaaaggtgatttttgattggcaaggtaagtagtcaatccttgcagctgatgaggacttaacatttttgtcattactgttcttctaatggttaatctgcctgatgaaaaagagccaaacagcatcttaacaccaaccagagctcagctcagcctagtacataggtctatgtgaccagttattatttcctttagacttgcatttctcatctgtctctgagcaccttcttgtatctattggccatttatttggctttctttgatcctttgttttttgaaaactaaaacatttcttgtatcagcaacctgctatagtctattccaaccatatttccatgtatcgtcttactgctgcttcctaaaaaggaaacattccctccagccagcaactgttccaccttgtttctcatcagtagggttggcaccagttcaagttctgtcaacactgttccatcagataaagctgttactaacataaaagatgagggggctggtatgcatacacactattcaagcaccaatgagcaggctaatagcattcttattgctcctgtgttagcctgcctgcagtctagtctaacttggctgtaccttagtgctggtggtgatacttgcccatgcatatatcagcatctgtctgataatagttgagtcctttggatgagagtgtatgttttctggttttcattgacaaaatggttaataattaagcttctgtataagatctttatgtaaacatcattttaataagctaaaagtctaatcagaatataagcagtatgtccacaatctgttattatctgtaccatttcactagttattaacagaattggataagcttcacttttacaaaatgttatatggcatgcttaatttcagctcattcagcataatggtgatcttctagaaagagagaaaagaagtatcagacagaaatatttcctatgggcctcccctctttgtagaaagaaatctggcattacatgtttttggggagcagggaatataagaaaggactttagggagagccttatatatcattttgttccaaaggatagatgttcattttgggcattatcagtcaaccacactgaatcaccttctgtgttatgtgatcagtttagttgtgtcaaatcagaaaagatttaatcaaaagctccaatcttttaattccctgcatttattatggtccttgtcagttctgctaagtgctcaggtatgcacagagaatttccagacacttatatcatcttgattacttgcttcatctttatcctgctgccctggaccatttgtgagccattaaaaatcttttatcctgtttaaggcttaagctagaggcaggtctagtctctaggttagagtttagaacagggtttttcaaattgtaggtagtaattcactggtgggttatgaaatcaatagtgtatctcagtcagcactttttatttaatgggatggcatcgactagaaaaaatcagagtatatcacatgtaataatggttttaaatattgttttatgatatttcaaatttttttgtatttggttaacaatatgaaattgccatttttgtaggtaaaagccaatataatatcatcaattttttatggctcaaccttatatatacagttttatctagtagatgtactaaccgtatatatatgtagagcttagatgaaaaaaattttttctacatatttccagtcaacagttcaaaagccattgggttacaataaatgtctaatatattgcaccatgctagaccaagaagaaatccattagacacttacctctagatctaaaagagctagtttctacttggtagaacaggactcattcatgagaaacaaatattttgtaattaatagtcaaacagtgttaataattaataatcataatttagcagtattcatagttaacaggcagcatttgtgtttcaaatgctaaaattgagtgtgcagatgaactgtaagattcagagacattcagagtagtgagaactagtatcatcaagagactcttcctcattgagggaggtaaaatgtagaaatgagtgtgactagaggggagaggatagaatattcatgcttcatctctgtaacatgagtttaataatagtctacagaaccttgattccatagtagaagcagaaatcatgaatagtagataattttgatgaaataggatcagaaaatagtttaactttgaaaaccactgacttaaatgtagatgtgtctaagggcatactgtttgggaagactttttaaatctcacttaagagcttaaggtactttatggaagagctttaactttatttagactttttagatatgattttttttttaggaaccttgggaaatggagaaattattacctcagggaaattgttattttactttrcaaataaaaatatctagaggtatttttagagacaaacaacatttatcatgtgttaatgggagcttagtgtttgtgtatttttcaaagtgaaatgaattagatttagatagcaaaatactgaaatatcctcaaaacaaatctgttctttgtatatttctcttgcaaactccatccctctccctacaagtttctagtctgagctttaatgtcctaccatgaccattttagtcacagtttttttgttgggctattttaacaacctgctaacatgctgccaacaatctctgttgctaatctcaaatcctgccaatacattctgtgtgtggcttttctgaaacacaaacacgatcatgtgtcaatccccttcataaagttctttaatggcatctcatttcctgtagcgtaaagtcctttgcgtggtatgcaaggccctatatgggctataatttgcctgccacactaagctcatctttcactatggatcccatgttccatgaagactagatttttctacatacaaatttatttcacaccttggcttttactgtcatggctcccttttcctggaatgccttttctatctaatgaatattacctcaatattcaagtagttgtttaagatcatttctctaagattcctgtcctgatactctttcatcattggaccagtgtttctcaaacttttctgcacattagaatcacctaaaaattccaaagcccaggggctgaaacccaggcatcggtactttttgaagctccccaggtaattcttagctgaattgaaatgtgaccagtttaaactgagttgtgctataaatgaataccagatcttgaagacaataccaaaaaatataaactagtttagtaataactttatattgattacatagtgaaataatatctttatatgttgaattaaattttaaacttataattaatttcatttgttttcttttaggtttttaatgtaactactagaaatttaaaattctacttatgscttacattatatttgtgttggatattgctggtccagaacaaatcacaatgatactaaactattatataaattgtaactaatagtaatatatggtatctgtctaatgtacacatataagtgttttttttccaatccttttctgcctcattgaaaaactaaacttaacataaattttattatactagaattttatcatgaagtattaattcattaagttgttaattcaggaaacatttgatgcttgttatacgtaaaatactctacaaggaaggcaaggaaaataaaaaccaaaataactatgtaaaattgaaaagttaccaaatacggatttcagaggaataagagattaaaaccaataccattataaccatttgaattattttgctattttacattatggagaataaggcaaggtgtggtatcttttaaaatcagctttattgaggtatactttacatacaataaagttcaccaattttaagtaggcaattcaatgagatttgacaaaagtgtacagttatataaccaccagcacaatcaggacataggacatttctattgtccctcaaaagttcccataaatccctttgcagttaatcccctctagtcatagacccagccctggcaaccattaatctgctttctcacactatagttttcctattttcagaatttcatgtgaatggtgtcatacaatgtgtgtctggcttcttttacttagcataatgctcttgaaattcatctattgtatcaggtttttttccttatttgttgatgagttgtattccactgtatgtgtataccataatatgtttatccatccatcagttgatgaatacttatgttacttttgtttttttaagtattatgaataaagctgttatagcactaatttattttggataaatacctaacagtgtgatttctgggtcatatggtagttcataagaaactgccaacctgtcttccaaagtggctatatcactttgcactccctctgrcaatgtagaagagttctagttgcatcaaatccttgtcaattaatggtattatcggtgtttaatttcagccattctaaggaatgtataatggtatttcaatgtggttttaatatrcatttccctaatgatcaatgatgttgaacatcttttcatgtgcttaaatcaggttgtcttttgttattttaatcatattattttaattggattgtttgttgtcttatttccttgaaagaggaatatattctagattatatattctagmtacaagtcctttatcagataaatgttttgaaaacagttttcaaagttcatgtgccattcatgtgcctattgaaagtatacagttcaatggtttttagtttattcatagatatctgcacagtctgttttattggagaacattttcatgatctcaaaaagaaacccttaccctttagctatcacctgttacagcctcagcccccacttcccctgtgcaaccactaatctactttcttcatatatagatttctctgttctggacattgcatataaatggatcatataatatgtaatcttttgcaactgacatcttttcacttagcacaatgtttccaaggtccatccatgttgtagaatgtatcaaatactttgttcctttttatgcccaaatgacattccattttatgtctatatcacatcttattaatttttcagttgatgcacttccaaatatgtgtttataaaatgtatttatgactcatatgtaggtactactgaatgaatatgttgtgtactatatataacatataccaaaaaaaagaatacagttgtccctcagtatccatggaggattggttccaggacctcctgcagacacaaaatcctaagatgctccagtccttgatataaaatggcagagtatttgcatataacccaagtgcatccttccatatactttaaatcaactctagattactttataatacctaatgtaatgtaaatgatatgtaaatagttgttatactgtattatttaggaaataatgacaagaaaaaagtctgcacatgtttaatacagaaacatttttttccaaataattttgatctacagttggttgaatctatggatacagagtccatggatacagagggccaactgtagtttaaaagatacagtaaaatataaatagcattctgacattttcttttcacttcttagtgggccattttgtgcactagaaaccctttacatatacaaatttttgaggttactggttcagacaagtaagttaggtgaatgaaggtgttctagatagtatacaacatgaacaaaagcacagatttaagagaaagcatggggccttttcttatcttgcaaattgtgtgtctagaacctggagaggggtatggaatctttcatcccgtcatttttatcctctccctcactatagtaatttaaggtttattgacaacatctatatactcttggaatgcctgagaaataatattaaataaaaaatttttatactatttaagcctatggttttgttaatactatttggcagtggatactagacactctattactacactttccctttagaagcaagcttacagtttgtgctcctttcagatagtctcaaccaagaattagcagtattaattttatttttgtccactcttctagcttatttctgaacatcttagttgcattattatttgagacttcaggagactgactttagtctgctatagaaaacaacatcaaaaatacgttttttgtactttccattctacaaaacccatggagaagtcccttgtactttattccatgctttgccaagttgccatgtgaggcatttatagaagaataattatgtttattctcacccatttggttrtggttgaatagaagagtgttgcaacatttactatattattgctgaagattttgccagtctgtggtatgtatcttgtgaaaatgcttkgcagactattaagaaagaatccagtaaccttaagtttctcagaaatatttctcaatgttggcttgcttgtttttctcttattcacactgttattattctggccaatttaacagtatattacactaattcactacataccttgaaggccatagtagttaacagtgtgttttctatatcagaaagtagagacaaagcatttgagacagactcaaaccttcacccgagtgagtgacagagcttggaatagaatgtgaagctactaactcagaatactgaacccagttcactcaatatgttggctttgtttagtgactaagccaaagaaaaaatttaatcagtgagaacgtgtctgtaattatgttctaatccaaaataagagggtgagaaatttttcacctcaccgagaagaaagtgtaagattgctttagtgactaattcactttatggaacttaatcagacaaacccaaataatccttctacaataaaggattaattaatgccatttcaaaacaaaggcactttttaagtgtttattttttttctttcccccagcaaatgtgtttttgtaatacagagttcagggacttttatttaacaagttgccttgatgagcattatatttctgttgtttcttgatcattcctttggctttctagatctcattagaaatgctcacagacattaagcctaacatggcacttgatgatcacagtttttcaaggcttgggacaaggaaagccagttactcagccaactctgctttgtccttgccatcttcccactcactctttcagttaytttctcaaggaatacattttccactaaaaaattcctttcctttttttttaaaacaaaagttaatctttcatttaaatgatatttatcaaatgtgagatagtgtaggcactattctaggctctggacataaaatagtaaataagacagaaaagtctctgccttcgaggaattcacattcctgtgtctaacttcggtgcccttctcagtcagagttcacagacatctagtgatcacatcattttctacagttttcagcttttaccaaaagcataggtctccaagtgtaatatcctggtctttccagtgacaactacttccctgatttattgttcctttgtttgttttttgagacagggtcttgctctgtcacccaggctagagtgcagtagcacaatcatggctcactgcagcctggtactcctgggctcaggcgatcctcccgactcatcctcccaagtagctaggactacaggtatatgccactatgccaggctaaaatttttttaaagacatgggatctcgctatgttgcccagcctggactcggaactcctgggctcaaaggagcctcccaccttagcctccccaaattctgggattacaggaatgagccaccgtgcacagccccctattatatttaagtgaattattgcctaaagcacttagcaggctgcctggcatatagaaagcacwatatatatatatatagtgcttctacctataacatatatatatatgcatatagaaagcactaaatatatagccacaagccacaaaccacaagccmcaagcactatatatatagtgctttctatatgcatatatatatatatatgtatgtatgttagttataggtagaagataggagtagcaaagcattttccatcattaggccaacaaatactgtttattctttaatcaaattcagaattataggtaagccccatgataagcagtgctacatttgaacatccaaattyatagaaaatataaactaagttttgataattcacaaaataattttctatgtttctctcaattatgagttttattggtactttggaaataggatttaatatagagaaatatttcttattcaaacaatctatgttaataaaatgaaaaatatgatatctaytccctgcttcttcaaatgatacttaatcagctgaaggcagtcataactataaagtaccttacagacataaaatatagtgccttgtattcactgccaaataataataatacctcatttatataacatcaacactttacaaagtcatgtcacatgcttcattacatttagttctgtaacagtcctgagaagtagattaaacaaatattatagtttctactttgcaaatgaagaaaccaaagtattaaagatatttagtactcaccctaacttaaatggtagatttgagattttatccaatattttttccactgtaaaactgcaaagtgctgtttcctcaaaaaataaaacaagccacaagcaatatgacctgttagctgtatgccagaatcagcagtctgattgctagcctacaattcacagcattaccactaaaattgagcagggcgacccccattcaactcaccatccgacctcaggttccagaaagcccatttggacacaagtagacttcaaatggagcatagttggatgagcttttcccctaccttcactccatctcaaaacttaatttgtcagagatgtcattaatctgacattaatctggtctggttggtctaggcaggtaaaaaataaaaatgaaaaaaaaagtcaagagtgaaacacagtcagaaacaactggatatggtgctttcaaatagttgtacatattttcatatttcaattaaaatattctcatagatacagaaaaataattttaccaggatattttccaaagttccttattaaaattattaggaaaaaaaatcccaagatcttggggagtcagtccctctctctccctgtctcacctttgcacttgcagtcactaaactactaaggaatgctttgttcactgataagaggtgtgtgggcatcaggaaacttgaaattttactgccattttatcaactaactaaagctagtactatgatagaaaataacccttaaaaaattcttagacacgagtccaaacaacataacaatctagaatggttcaacacatttaactttataaaaggctcacaaataatcaataattaggtataggaatattagaaataaaaatttttataagaggctcacaaacacctatgaattatttttggcagtataggaccaacaagatataaaatgtggctgctcattgcttaccaaaataaagttcaaatttctttatttggcattcagagactttcatgatcagagttttgtcttattttctttattccccatcttatttatacattcttcattttcaaagaataatttttctctgcctcctgtgcatcctgccctgtatttcctttggttgttatgtcttggttattatttctcgtttacctgctattgccaaatcttatttctcctttaatgcccacttatgctgccacttcctctacccagctttccctctcccttctctgcatgaatttcctaaatatcagaacctctcatgttatttgtaccactacacagtaatagtgtatgtcttaccctttgtccagtatataagctcctaacctggaaaactgtcattggtttccctcactcctacgcataatagtaccacctaccaccataactgtttgcactaaatagagtagaaaaaggatgagctttgaagtctgacagccttggattcaaatccttgcttcatcatttattagccatataaactggggtaagagataacctatctaaacctctgtttcctcatgcatgaaatagggataataataccccttctgttgttacagaattaagtaataaagcatgcacagtatcttaacattgtgtcttagacatgctagatcctaaaaaaatggtgatggtgctggcagaagtggtcatacttatattttagaagctactttattgcttcagtttcctcaatcacataggaaatctaaagaatactctgcaataccacacatgcaagtattttaaggactgttttgaacagatttgtaaattcttataactacttggagaaaattaccttatgttacaaaacaatagaaccctcctttaagtactgttagaaacacagatattctgcaatgcttaattcgccttgggcaattttaggtagtacttcttgagtctcctttctcattggcttcataaattctttttatcttgaagaattttttttttcttactgctacaacacggggtacataatttgtagtttccacatccagaatggcagggcaacatggaaatgttttcaaaatggccatcgagctacaagaattgcggatcacaccatctgcagaagcacaaagtgtgctctcttgaggtacctggggggcaacatcaatcaacctgtgtgctagtccagaggtttgcgtgagggagaatgagcaaatttaaacaggaacaacaaactacagctgataggtagaaagctggagcccscaaaagaaaagcacatatgcccctcaacaattctcaataatcatttatatattgcagttgtgtcttgtgatcattactaagaatacagaaacatctgtaaaaagctgcttatcaagtagtctatctgacaggctccctgataagtttatgtagtagacccactgtttaataaaaaacgttattagggagactctgggcacactgcccatgggttaaccctgctcctcaaggagcagtataagaaaaattattagtaaaaataagacaattaagaccagttttaatgttttgtgttcagaacctgtctttactgatctaagttctctctatcccttaacatgttaggtaagattacttaaatttatttgaattgatttttagtataatactttgtggtatcctaaattatatgctgtcatgactataatttattaccaacataactgctatttgaattataaactcaacaaagccctttactcctgaaaagacaagataaaattttgtattttgataggagtagggctttaaaacaggttttttttttaatttccgacatcttaagggaaaatagcaaaagtaaaaattttaaaaattcctaatttagagagttaaaactatattaaggatacattccattttataaatgtcacactatgctgtaaatgtatataaccccaatgtgattactagtttgttatgaagcatatgtgcagtgagaacgtgctacaaagagaaagtgtatatggtagtgtgtgtagaaacgagacactggcttctcgtaaaacctgttttctcatactcccagtttagcacaatcattgaacttctccaaacctcagttttttyatctgtaaaatgagcaggttgctgatacctaagaacttcacagtactcaaattttatgttgtgattctagacatattccttttatgcagaatttaaaaatcaagattaagcattcagtagcatgtaaatatataaaactcctagatatgaactcatatattcacaagctacccttctctaatggaaaatacagtcgaaaatcagtgagtattttcaagtttatattttaaaacagaatccaatctgaaaaactgcataaattttaactgtattatttattccatgagacaatttgtaacctgcacatttctcaaattctctaatggaaaaacacagaggaaaacgttctgtattattttattttgagaattattttaagcccctcataacatgaagcaatgaagctaggataaactatagaagaaaaaaataacacttccatgtaaattagactgaattacacataatcagtgttcagtgttgaggcatactttaatgttcaagtatatttcagataacccctaaattatttaaccacttttaactaattttcatgaacctttaggaggcttattgaccaccagatggagccagtattgttcaatttgtagcataaaaatatgctgaaaatgaaaactggtgaaacagaatgaataaatggtagtttttttattgtagtccatagtatagaaaaaataaactttagcatccttctgtctagtttctgtaaaatacacatgtatagagacccccccattaaattattttttattatgaataggtttttattttggcagctccattggacaagttttcttcttattcactatttgaatatatcaccttaacaactttcaagtatctttaaaacaaagttagtaaggctttagtctctggtcactaaataaatattatgggttgtaataatgaaaaaatgatagtatagaatatattgcctataggctctcattttattgtcacagaatattcccattataatttccacgatggattttcttaataaagcaaaagaaaaggcattctgactgggagagggagaatatgtagtttatcaccagtagctcctcaggagagatggtaaaaccacaatgaatggctgcaactcttacccagaaagcttagtgcccagtggccctaatcaggggtaactgccttaaagctgacttcatgaactcctctcacctttatttaacaagtgtcaggaattatctaatcccttatacctcaacttaattaggcaaccatctattgaaaaagtatttgtatgctaagggccctaaggccctacaagtccctccaggaacttttccattcagtaaaagcagtaaggtgactgtagacactgttgtaattcaggacctaaaaatgatctatctgtttatttgtccattcagctactatttatttagcacatactatatgcaaggcatatgctaggccacagttcttgccatgtgagtttacagcctggagggcaatataaacaaagaagcagttatgatacggtgtgcttgggagccacgaagtgttttgaaggttcaaatgaggggaaaatttgattaattaaggagaatcgagaaaaagccataagggattcttcctaggtagaacttaactgagtaaacccactgtttggtcttttttttcccctcattatccattaaaccatatattatggtctgggggagtttagggcctttttttgaaggattttatttcatcgggatatacccagttggttacctgatgcatttttgtgtcagattggaattgttttcctagggatttttttttttttctcaaacatgaagaagaaacaaccaaactggttaagcgcttgtactttagagccagactacataggtttatatccccaggcttataatccatgtgataaattatttaaccttttcctgctttcgttttctcattggcaaaatgaagttcataacatattttcctgacagaattgttagttagaagattaaacaagtaactcagttaccagtgtctggcatatagtaagtaattgaaatgttaaatgttagccatcgtgttagctattttcaagtctgatacttttccttgaattaatttaagatctggtatattaaaaaaaaatacaaattgactttgtattttccagaaagtatgaggtacaactagacattagtagcattaacattttttatatccatcaagtctattttgttaatcaaatgatgtttactgttattaccacatcacctttatttagttagcaaaaattttcttgaaatagtaaatccagagacatttaaaatcatttataagcaggcttattaacagttgctgtcacagaatagccactcagtacacttctttttttttaagagattgtctcgctatgttgttcaggctggctttgaactcctaggcccaagtgatcctcccacctcagcctcctgagtagctgtgactacacgcctgcaccactacacccagctcaatacactgttttttttttttaaatgaatgaatttgcagctacttaragctgatagctccttgactctggtcctgagacaacagagggtataagtataagctcttttaatctatacagtgaaagctgtggatagataacattggttcattaggtaggtagccaatgaagagactcaagtggattgaagattaagtttctgactagctcctagggaaaggataagggacatactttataacatgcaggaacaaatgtgcagtacttaacttgcagtcttacaaactaagagttggaatacaagttttagcccaggctctgctgataactcacatgagacactagctaagtaatgtcacttacctggtccttagttgcttcatctatcaacaggaagttagattagaagatcctcaagctacttcctagctcttgtgctctagtaaactgatggttatagtgatgttggacatttccttcccaagccctttcatatatatatatatatctcctatttttatctcatacataactaatatatttttttaattttattttaacgccatagcataggtaatctttaagtccccaagatgcttgtattatatccgtgaatccacattttgatacttacattgtaagtgatatttttcatgtatgttaagttcattttaccctttaatttctggaatgaaaagcctgtatcatatgttttacatttctttcaaagcatctcttagcataagaggcacacagaagacactgtgtaattatgaattgaagttttaattgaagacagtaggacacagtgtggacctttgtatcatacatacctcagctcatatccaagctttactatattctaattttggtcatatcctgtttcctcacttgtaaaataggtttattgatactttcctcatagataatcaaaacaccctagcatagtgcttgacatatartaagttcttagtagatattcttttttaattccatccttcattactatctgtttagcatgtatttcatagaaatttcaggtaatgatgaatagtcattataatgcatcattattgtttatgaatcatccagtgtacattgagatttataagaaaagtaaaagtagagcactctgtattagaaaaacagaattattttaaatgtcttgtgtattttattagccagttttacttcactaaaatcatctagtcacttattgaatttttgtttattcaggaggattcaagcacatgagaaatagatgtgctacttcctgttctggcaacatggactgagctaacacaaaactttcttctcctacaaatctatagaaatgctggataaaatatgatccagcccaatttaaatacttagctaggcttgaggaagagagaaaagaaggtaagaaagaaagaaaaggaaaatcataagtaccagaaacaaaaggaaggcataaccagacattgagtaagccaacactacagtggcccaagtggattttggacccaaatggaggctctaatatctagaagatagggttttaatctcacatttggatggaagatatggccttgggttagagaggtaggaactaaaaatctgtctacctggtcaggaatgccacaaagaagcttgccatttttcagaactctatgtggcagaaaaaatgaaagactcttatgaaaaagccaaaactctaaacctctaccaggcataaatataaagtctgaatgtatgctatttatatggtataggattcctaagtcaagaaaataatgggaaaaaatggctctggaccaatggaaccccttgattgtctggtagaaaccaatgcaaaacctctctataggaatacttgaacaatcttggtgcctaggattcctatggagtgtgatggagatgcagtcctagctgaaaataaactcacaataaaagattagaaaacacataaataaatgaccaccctagagagagggtcagaagacagaacagaacaatccccaagaacaatctgagtgatagaacataataactttgttttaaataaagagtttctattttgtgagacagagtctctctctgttgcccaggctggagtgcaggcacagtcttggctcactacarcctccacctcctgagttcaagcaattctcctgcctcagcctcctgagtagctgggattacaggcgcccgccaccaccacacccagctaatttttttttgtatttttagtagagataaggttttgccatgttgcccaggctggtttcaaactcctgagctcagacaatcagcccgcctccgcctcccaaagtgctcagattacaggcatgagccaccatgcctggccagtaaagagatttttttaaagaaataaaaatcataataaaaaattaaggcaataaaaaagagtaggtgatttgtaaaagagccatatggaatatttagaaatagaaaatatagttattaaattcaatgacccagtttatggcttaaatattgattagatacaactgaacagagaattagtgaactgaaatacagagctaaggaaattactcagagtatgctgatgattaaattatgaaacatgaacgtactatgaccattcatagttgatcatactgtaaatagaagtactttatactaatatgatacaccaagttaggaaatagaagaccagttttttcaaatagttgggtttttgtggcaaatgtcattgcatttggctgtgtgtaccctgtaaagtgtttgagttacagtttccatgcagtccaggtggaatcttaacaggcttaatcatggtatcacagatgaatataatgaaacatcagcagacgtcacagctattctcaaactgtctgcctatttgtttgggctagaaatgaaaacatgaggaggggaaagatatccttaagtcaggtaattaaaaatctccaaagaccaagaactggagcagccagtgggtataacaggaggtggtatgactgccttgtcttttctgaacttgattatttagatttatgactttctggaaaaaaaattgacaacactatgaatttgactgggtttctatatttacctgacatgttttccattttgataaatgactgtaatatgtctacattataaacctattagtggccagcttttctgacctcaaacagttggctggattggatcagtctttctgagctcaattttattattgtaatttgtgatgcaaaggtgatttacttttttaagttcttaattgkcattggtagatggacagaaaaaattaccaaatcaatcttttccacctggaatttatgtgaacaccttcagccatatcttggcattttatcttatggatggaattgatggaattcattagcaaaatgatatgtctgagaggaaatcccatttaccctgaggcagttttgagtatttatttagacagggaaattgcttttgggarattctaagtattctattacttgagatttttaagttaattttatggaatttaactttagaaaatcttaaaattttagaatgaaatgtcatttccatgagatacagtctgtcccttttatttcattgaaagaaaataatktagtagtacatggaattttaatttgaagttttatcagatcaactaattctacatgcaggcatacagacacaaagaagcattaagttgcccttcatcagcactttagggaacatctgctttaattttatagctgtttgtgagaaaattatcacaaggtaaaattagcccaagctaaaatactacatgtttcagtggtaagatcgtgtaccactgaattaggcagattaatagacaacccttaaaataatatttgttgcccaactatctaccctgacctaatatcaaatttgtgtaattcaattgtttctcaactcttgttagtccrcctatagttggtagtcagtggaattttttcttagctctgttgagtatatctttaaaaaaaatcaaattggtattaaatgattaacaaccacaatcaaattaaaagcttcaaaatacatccaagtagtaaaactcaaagatagttgcagataaaaaacaactcctgaatcacttgaacccgggaagtggaggttgcagtgagccaagatcgcgccattgcactccagcctgggcaacaaaagcaaaactctgtctcaaaaaataaataaataaaaaacataacttctcaacaactttagaagctgtcgctctctttagagcattctttatttaaagcagtatgggagcatttacagctgtataatgatagggaacaccctgtgatttacccattctgccctgaagcaccaagtttttgagttcttaacttctattacaaaatccaacacagttggctgtgttgaagtcaaaaaggtctcacccataatcagaggacaaaaagtcaagtttttatacactttccccctttggaaaccaaaagctgcagtaaggataagattacagtccaagactttgtcagatgacagttgagttagcaattgaggcatagacaacattctagagtttggtttcattctcagtccatctgctgaaaattgtttaactggagcttcattaagaatggaatataataaacaggggtagatggaaatagtattgaaatatgtttgaagccttgtgaaacaagagttaccttacttatttgatctgggatcatttaaatcataatgaaaagccataaaattttacccaactatttccttagcatttttcaaagcaaaactggttttgcaatcgattttttacttcagttagagaatattaagtcttttctttgtcattttaaatgtagatcctatcaccaaacagatattttcaaacagatcctacaatttacgggtgaattttattcattctttagatgcttgccatcactaccactaattgccttatacaaaacatttatgaagctggttatgactatacattaagaagaatgactaatgctacaatattaagatattatcagggcaaatacattcaggaggatttgaactacgtgcctgtgttttcattatcatggctagaaaatataaaaagagtgtttggtttcataaatactaatgaaataaattgatacatacattaaagttgtcttaattagcttttcaatataggttaaaatgtgagaaatgcaggaggaagtaaaataaaaatgctaacatgtctaagagcatctcaactggaaaatccttataaccacttttagaatgtgtatagcttcataatctagcaaaaaaaaaaatagtttcccttttccctccatcaatgtaagaaattccsttatatgaaagaaatgtatttgtatggagagggaaagagaaagaaaaacaagcttgacttgtgcaagagtctgtgatatcctttgaaagcttatcacttaaaacaaagaaaaacatatagagttagcacataattgtacagtcagtgtgagtgtatattttgatactttcataatttaatctgaatgagatagtaataatagtttgttaggtgtttgccacatgtcagacagtattttatttaatcctcacaacagcaagtgaggtagatattatcatccccagtttatagctgaagaaactgaggcacaaaaagatgacatagtgtatccctatctcactcatatagtaaattgtggaaccaggattcagatcagtctcacccaaagtctatgctctaaagatgccatgctcactggcatctcctatactggaaactgagagcacatattctttcttttttacctactagaggaaatgcatgtgctttaggttactgtctgagtgctagttttaatgtcttaagaatatcttgtgagttaaataagattgtccataagttgatgctattgataataggtgatgactaaagaggcttcattataccattctctctatatttgtgttgaaatttttccataataaaaatttttgtttgttttaaaaatactttttgwccaactaacctttctggattggaagttgttcattggtttgttcagtgagtcttgatgtgagaattaattacattgcacatatcttctttttttttacattcccatgacattttggtggaagagaggtactgctttttgctctccattctatgaaaactgcttatttctatttgctatttcatgttattgcttctagtatatcagccagtcatttttacaattacccatatttgtttcaaaacattcctgtttctgaaatactaatcctgagatagtcacaaagatgatagtaaatagccactcctcactcctatctcacaccagcaccatgactgtacatgatggttggaaccaaaaggatgtattatagacctcaacatggcaggttaagtcagtaaaactttgatagattcactattgttaagattgcagttctccccaaattaatttatacattcaatgcagctactgtcaaaatcctacctgacttatttgaagaaattgtcaagctgattttaaaatttatatggaaaggcaaaggaacaaaaatcaccaaaatagttgtgaaaaagaagacaaagttagagggcttacactaactgattcaagacttactataaacctgcagtaatcaagacagtatactactggcacaagcagagacatagattaatggaacagaagagagtgtatagaaatagatatacatatgtggtcaattgattttcaagaaaggtgccaaggtcattcactggaggtaagaaagcctttttaacatataatattggaacacttgatgtctgtatagaaaaaaaatctcaacccttaccttacgccatatataaaaatcaacttgaaataaattatatatcttaacagaaaagctaaaattttatattactaagagaaagcattagaaaaaaacttttgagaccatgaggaaaataaggattttttagataagacacaaaaagtgtgatatgaaatttaaatattgataaaatgctgttcatcgaattttaacttttgctctttgaaagatatacttaagaaaatgaaaagggaaatcagactgagataaatcatttacaaaatatatatttgacaaaggacttgtatccagaatatataagaaaactattacaactcattaataagacaaaaaaaattaatagacaaaagatttgaaaagaagatacataaatggccaacaagcacataaaaaaygtaatatcacttgtcatcagaaaagtaacactagaaaccacaaaatactatttcacgctctctaaaatattcagttaaatgacaataccgatatatttggagatatggagcaactcaacctctcctatattgcgagtggaatgatgcagccaaaatggtgcgaccatttgtaaaacagtatggcagtatcatataaaattaaacatacacttatcacttgactcagcaatcccactcctaggtatttacccccaagaaatgaaaatatatgtttgcaaacaaacttgtgtgtgtaaatgtttaaagaggcattatttgtagtagccaaaaacggtaagcaactcagaataaacaagttagagtatatccatgctatgaaatactattcagttatgcaaaggaacatggatgaatctcaacaatagttgctcaccaaaataagccagacataaaaaactacatactgtatgatcccatttgtatgagtttctagtaatggcaaaaatgtggtgccagaaagcagatcgctgatgcctcattgccagaaaaagaaaactgactgtaacagacatttggacactttgtagggtatgtggaacttttctagatcttgattgcagtggaagttatatgctctatacaataccaaaagtcatcacattttatatacaaaattagtgagttttactatatgtaatgcctacctcaatacagctgtttttaaaaattctatcatttcatgcatttagtttccttaatgaggtgactgctatttctaagttattaaaaggccatttagtattataaacaacatagctacagaatttccatgctttattatatacttaaatgtacctatccttgactttttaaaattgatttgtaaggcttctttatagcactttttaaacattttcctacttccttcacattcctaataagtgaaattaagtggttggtccttgctaaaagggaccgtgttcaagaagatgcgtgtgaaacattaaaataagcaatgctgaatctgttttgaaagttgtaagcttaacttacctatgacatgagatagcagaattcatctatatcttttccatttattgcaaaattcttaccacacataaaggttttcaatcttttttagctgaaaatgtaagcaaagaacttgtcctttctcttttgcatttttttaaccataaaaacattaaacagttctactgatacccatcacaattttccttagaattttacaaacttctgccctaggaaatggcagaaaataattattgactccctaaatgcaatggaacaggagattccaggtgcatggcaaatgctaactataactgaggctggcgaggggaagagggcaaattaccctacaccttcttattttccccttcttcaattacattattacttcatttatttgactatttattgaatcacttgccaagcactgtcctaagtgtatctttgaaagatacacttaagaaaatgaaatgaggacatgaaatgaaataagaaaaaaaaatgaggacaaatatgatttgtcctcaaggagttaatgtctagtgagtttaaagaagagtaaacaggaaatcgccataaagtgtgataagtgctaaagggtgctttggaagctcaaaggagagacatctaaaccagacttcaagaacggaatcagaaaaggctcactgaagtgccaaccaagctgagacctaaaggaggagccggaattaagcaaggagaattaacaagaacggagagatgaagtatttgcagtatccctgaaggaagaaaagcatgtgcaaaggcggatggttggtcaagagagcagggtttaagaatactagttatcagccaagtgaaagcacatgaaggtggatacggcaaaggagttgtctcttgagagacgtaactggaaagcaaagcattaactgcctcatgtagggatcctaagtcatcttaaagtgcttgctctttatcccaggacaatgcaaatctaactactgtaggataagaagaagagaggtattcaaagatgtaattcagtagaaaaatatgaaagtaatttttttttttttttttttgagacagagtctcgctctgtcgcccaggctggagtgcagtggcgcgatctcggctcactgcaagctccgcctcccgggttcacgccattctcctgcctcagcctctccagtagctgggactacaggcgcccgccaccacgcccggctaattttttgtatttttagtagagatggggtttcaccgtgctagccaggatggtctcgatcttctgacctcgtgatccgcccacctcggcctccgaaagtgctgggattacaggcgtgagccaccacgcccggccgaaagtaatttttaaacctactataagaatcacttcatgtataccagtcgtgatggcatactctttatactagtctttactaggcatgtgtgccttagatattatttctgtatttaatggttcatttttccttaatgtgctcagtttttaatgtttgcagctgtcagttttgaaaccaggactctccttccaagttctaccaaaatcatattaggtaaccacaaaaagataacttgtttcttagttcaaattttttttttkaccagaaaatctcttgaacaaaatggctgattgttaatagattgcatattcatgatgttcctcaagctagataacaaagagacaactaacagactaaagctttggtagacagattactagcattcttgattacatctggcttatcgtttgtcttccagccaaagagaagagagagagagagagggagtgtgtgtgtgtgtgtgtgtgtgtgtgtgtgtgtgttttagtcacaaatttcattgatatttacacatgtgaggtattataaaatgttactagttgggtttgttggcttgtttgtttttgaggcaaaactgtgttttatgaaccaagatgttaactaatcttcacatagaattattgcaggttcaaacctatagatttgttttctaatttctaattcagtaaagattatttttgtctgcttttgctaactgttttgacttatttgttagacatatttattttctatgatgccattaaattgaaggttgttattgttataactggggaacaaaagtggcaggtaattggaatatcaaccaatatttggaaggttatatcttctaaggcaaggaaaaaatgtaaaatggtattgctgaattttaggaaaaccttaattattttaraagtgagatagatgattttataatcaacttaaataaggacatgtgagaagaacaattacaatagtgcagtgtatagtaaatatatgtatatcaactcataaattagcatcagtcacattctaatttaggaagtagttacagagctggtggggcttacaggttttcttttgaaattaaatggtgaaaaagcaagcccragtgccaacctcctcttcagcaacaggagcataaacattgctatgaatccacagagctattttactgcttattctaaaaatattctactattctttagaggaagaagcccctccagatggtgctgttgccgaatacagaagagaaaagcaaaagtatgaagctytgaggaagcaacagtcaaagaagggaacttcccgggaagatcaggtaacttcaaaaacccaaatccatacagaacttattgtctttttattgtttttaagtgtttctaaatggagcctaatttgattatatatcaggagaagcactacctcttaaaaataaaaaagaatatatttatatagggtggacattggccactcacataaagattcaaactctggagttctttccagacattggtggtgaaaaagcctggaacttccacgtttcaacctggtactcccatagtaagcacaggaacctcataaagccatgtatcctcagaaacccaggtggaacctctgtgtagtgaatattatgaaatgaagaagtggtgattataaatgatgagagagtctcttccagcccgacatctcgcatgctgactagccagcctagcttgaaattgtacactgtctggaaataagtcatttggtctgctagctgacttctattcattagtacaagtaattcctgaatctttaggtagtaatattaagaagttagttgtcagaaatcaagaatgaaaagagataggaagctagctcaacaatttgggagtcagcactatgtgccatgcagtacttgacacttgataaaacaaatctcttaagcagcccttcatgytgaaaagttagagggcagactgaaatcatttatttttggtgctgccatatatatgtttatatagatagacatatatattaatatatatggatataaacaaactgccttatatatatatatggacacaccattttagttgtataaataaaacgggcaaagtaaaagtaaattaaaaagcccaaacctgtctggataatttcttaatttcattaagaaaaagtacattattaacttgttttcatgaaatcacaaagtcttctaaatagcaaccatagtgactatactaccagagatactaaggatgactcattcattcattccttccccctccccccattcccttgtagcaaataattattaagaacctgccatgtactaatcactgtatttggcagtcaacacatgaacacatccctgctctctctgatctatcagggaaaagagctaaacaagtaataccagtgaaagggggtgagcattatgaaagggtaggtacaggaagccatgtagatgaataacagaggggccttacatggcttaagaatctgggaaggccttcctaaggaaatgatttgtcagctgaacttcaaaggttgtgtaggagacagccaggtagaggcagagcatggctagacaaaaggaacagtgcgtacatgaaaagtcttcaacctctttgcaaagaactaaaagatattaaatatgattgtaacataaactaagagaaggagaaagatgaggctgaagaggtaagcaaaagtaagttcgtacaaggtatttttaaaccatgttaaggagtttagaatttatcctaaaggccatggggaaccattgacagaaggaagtgatatgatctcactttcattttaggaagatctctctaactgggctgcaatatggagattagactggatacaggacaggaccagaggcacagggcccagttgggagactcttgtgttagatatgcataaacagagtatgccaagattgggctccttcagcatagcttctacattctgggaaggctctcgctgtgctgaaagagcattcctggaagtagttggccattcgttctttcaggaaaagccataactgaataattcccctgcagatgccaatcaaaatgcctccatgcagatcctatcttcttcacactawaacaaatgtgtcccattatttttgtgatttttttctgcccagtgtcttctctagcctttataataaagcaggagaaagtctaatcttaaatatagaagaagctaaaaatagccaagaggatgttttttgtttgccacagtctcccctctttgagcaaatgccagtagctcattaattggcttaaaaacaaactgccttgccacttgtaactcagggagaaagatccaggtctagtataattttctaggaaattttaaaatttcattccatttagaagtcttttttgttttcatttttctttgtgcttttaaaaaagacatttccaagtatgcaaacatccatcattaaaaattagttagggccaggcatggtgagtcactcttgtaatcccaggactttgggaggccaagatgggaggatctcttgagcccaggagtttgaaaccagcctaggcagcctagggagacccccatctctacagaaaaaaaaaaaaaaatagtttggcaaggtggtgtgcatctgtggtcccagctacttgggaggctaaggcatgaggatcgcttgagcccagtaggtcgacgctgtagtgagccatgattgtaccattgcactccagcctgggtgacagagtgagactctatctcttaaaaaaaaaaatgatagggtttacttttaagctrtagtgtattagtccattttcacactgctgataaaaacatacccaaaactggggaaaaaaaggaggtttaatttgacttatagttccacctggctgaggaggtctcacaatcatggcagagggtgaaaggcagttcttacatggtggtggcaagagagaatgaggaagaagaaaaagtggaaacccctgataaacccatcagatcttgtgagacttattcrctatcacgagaatagcatggtaaagaccagcccccatgattcaattacctcccactgggtccctcccataacacatgggaattctgggagayacaattcaagttgagatttgggtagggacacagccagaccatatcatatagattaaatagatagatatggagataagcatgtggagagatatatttatgcaatagtagatatagatagatatagatacagatatataaacacatacatacacacacacatactacctggaagtatatttaccaaaatattaacagcggttattctgagtggtaggataatagttattttacttctatttttcaatatttttacagtaatctgttttcttattaataagcaaatacaataagaatgaataaacaatggactatttttaatgagtaaggtttaaaaacaagggatactttatctgttaacattgtttgaatagcttaattctataayctctactctaaaaacagataaaacakctaaatgctaacatactctgcagccctcagaatgcctatgatgacattctataggaacttataaattttccccaaaactcatctcattcagtagctatgataatgtgtgtatttttagctgttgaatatgtgggcattaaattttgcagaaaagtagaagatgctttttactatcatttttaaagcaataaccaaccacctttttcttgcagttattttgacaccatttgtctttattaagcttgagttctagattgcccagacctacttaactttttcatgaactgtgatcttattgatactctctagataaattctggagcttaggaatgtattgtgactctctaatataccagttattcacatgttgaactgtcacacatctttttccttatgaaatgtgaggatttcagtattgaattcaacataccaaaatcttgattaggcccttgatttctcggacaggtagtattttatcccatttcataatgatggactctgtaaatatgttgaatagaaaaacctttttctagcttctgttgtctgctcaaattctggagtagactgttaagacctaggagatggtgtgattacaaaattatagccacttgcttcttcctgcccacagagagcataggagccaaacaagaattcacagtcatgttccccctacacacacacacttttaaaaaatatatacttaacacaatatttgtattcatctttcacttaacaatmgaatgcaatgtttcatgtatataatttttaataacaatagcatatttaggccaggcatggtggctcacacctgtaatcccaacactttgggaggccaaggcgtgtggaacacttgaggtcaggaattggagaccggcctggccaatataatgaaaccccatctctgctaaaaatacaaaaaaaattagctgggcatggtggcacgtgcctgtggtcccagctactcaggagtctggggcaggagaatcgcttgaacctgggaggcggaggttgcagtgagccaagatcgcgccattgcactccagcctgggcctcacagcgagactctgtctcaaaaaaataaaaataaaaaataaaaataaaatttttaaatarcatatttattgctttttactaaatttatctagtttcttattgatagacatttaacaggttttcatttttccatttgtatgagtaatgctgcagtgcacatcttgtgcgtaagccattttctctgtttcaccttatttttctatcgtcccaggataggaattactcagtcarggggaatgatcatcttaaagttaccagtatgtatcaacagctttctaaagacattccaatttactcattttccaacagttaatatgttcattctaccttccctatattgatatttttatatttttggaaatttgtgaaataaacaatactatttttttatttttgatttcacataacttagtgaattacctttctttcttatagacactaaactcaactataaatgagcatacattttttattttattttattttatttatttatttatttagagacagtctcactctgttacccatgctggagtgcagtggcacaatcayaggtcactacagcctaaaactcctaggctcaagggatcctcctgcctcaggcttcatagtagctgggactacagatgcacaccaccacatctgactttttttcttttctttttgtagtgatagagtctcactacattacccctgctggtcttgaggtcttgaactcttgggctcaaaasatcctcccactttggcctcccagagtgctgggacatgaaccaatgcaccaggccaaacatgtattttcaaaagttgggtcttctgtcttctatgtaagcaaacttttgtttcccaaatcagaaaatagtcacctatctctgaggggaaatgtcagtgcaaatccaaacagaatgatgtcaaggtttattaatgtcattattgcagcctaaaggtagttttgttctttttgttcaaaatcaaacattttgttttacatccaagtaggatatttccttttctaccaaacttaagcatctcttttaaaawtatatttatctttatcagaaaacttagcagyctaattgttatttcagacccttgcactgctgaaccagtttaaatctaaactcactcaagcaattgctgaaacrcctgaaaatgacattcctgaaacagaagtagaagatgatgaaggatggtaagggctttgatttctgtatattaaccatgaacaaatagtctcagagcagagacactactggggcatttccactatatcatccttttgttttcagagtttaccatcaccattataggacctcggcaacttttgactttatttcagttcaatataaagtaaaataaataaacacaccaagcactgaagaaacaagcatttattgagcacttgatgtgtccggcattgtgctagtcagtaaaaaatgcacaagaaatatatgacactatcccagttctaagtaactttctaatattgtggaaaagatgagactcacattaaacaactcraaaacaaccttagaagataataaatcaataatttctcacattttcccacaaacmttttagaactcagtaatctatttcataatccgactaacttcctcttcaaagttatgatctacaggatcctagcaactcatacatagttaattttatttttatctttggatatttttcagctttttaagagactgataaataaagtaatgacatatacatatcctttgcttagaactttatcctatactggcaaaaaaaaaaaggaataaaaattgtgtttttctttatcacacccctctgtcctcaagttgacttcacatgcagtgtattaagcctccccacacctaactgcctccacctcccactacaccctggctcagccacattgctgcaagcaagccaatgtatcaccccctacacatgactcaccctctggagcctctgaaccatcacatgtgccattaccccaacccagaatcatagcctcggttctctctgccaaacagcatctcccctgtttcaaaactctgttcaacactcccatccttcaggaaaccagtcagcaagatttgttgagcactcacaaatctagagggtggaggaaggagggctggaaaacacatttaaaaagacataaaaacacttattaagaaaacattcaaacacgtaagactctgcaactgtatataactttaatcaaaagggctgagggcatgatgatttgaatggaatgaatcctacctaacctaggaccctgaaagcacttgtctatttctcaattaatttatagttttcatatgatgtgggttacgatgccagtttttgtaagatcctagatatcttttaataggtttctattacttatatagatttgtttatacaaataagttgcttgaaggcagaagctgtctccttccatagtttggtgccaaaggcgaaggctcagtgaatgttgattgacccatagttaaatgcacattrtatagaactttttgttttatatgactggacaggtttagtttagttttgttttgggtttttgggtttttttttttttttggcggtgggggggattccttgaatgtctcaaaatctctttcaaatgttttgggttcagccaccacacaaaaaatgttttgccaagtcctcttccctttatttttgaatccatatgcatttttraaggaaatatgacccrtgtgtttctgattcatttacacttaactcatcaagatggtgttttgtaagagcagtttgatgcccaataagtttttttaacctttttataagccatttaagtccttttttattgaacaggaaagtcaccaacaaattcaaaccccagaagttttatttgaagctcataacccacaggattcaaatttactttcaacttggcaagaccatttaacttccaaggttcttcctagccccttggttcagtattctctcattttgaattcctcattagcttcagataccaatgatgtatttttaaaagtgccattcctgtttttcatgttatttgattatacaatcaattttctgtctaacattctcattagaaagtttaaaacggggaaacttcactggacatggggaaaaaaatcactggccaatgatgttggctaattctccattgggagaaaaaaataaatggtgaagaagtggggaacaagttaaaggaaccattagcaggtcttcagggcgttcatatctgctttcaattgcagtcttctaaggagaaagtcagagctgtacactatgaacctccagaatktttttggtatttgttttatctaacatctaacaaaaataccttccatgttcaaggcactatgcagaatcagatagcatatatagggcccttatgtaatgcctttttattgcaatttagaccttggattttgtaacctgataagcaacaacatcatttctgttcagtatagctttctcaagtctctggtgatttagatcctctctcataaagtatattcttctcaggaaaggaatcttatattcagaatgatttataacaaatattatgagtgcatggcatgtgcatgtgtgttatgcataaattacatggttcccagactattttgtaggtcacggttgccgcttttctaagaagtgaaagtcagccaktgtgctgtactacactgtcagggtctgttatctgaggtaaaatgattgcttctaagacatttttatgtgtccacatgagtggccacacattgagggatcattttcattttctgtcaagatagaaaccattaccaatttgttatgttttcttttacttggcaaattattctattcgcatttttggctgagctgctgtattggcatggtatacaacagacatttgggtaccattcagcagcattatactttttatgtaaaaaaaaaaaaaaaaaaaagagagagggagagaaagaaaagaaatatgattcaattgtaaacagtgcgtatggtgtttgaaaattattcccagatttcaytaacaaggcatttaaagaagtgttattagtagatctaaactgaaatgcatgatagaaatttttcactcagaattactaggattcctcctttgttcagatatacactgccaatatttagtgatagtgatggtaccagattccagtttagcaggtagagtggtctctttgtcactatattccttagtcccacagtatacagactcatatagctgtagacccttctttgagcatggattttatgaaaccgattagacacatggcaggaggaatttgcccagggattcatatgaccatatggatgaagtccatatgccaaattgggtttggttagatgaagcttggtgagctcccaaaaaagttacaagaaagatagccacctgctccttacacaacaaaattggcatttctaaggagaggagaaagattaaatctatgtgaataggcttcgatcttatgcacattaactcttcactactatgtttcattgaaaatttctttccagattgttaattctaagattaacttgaaacattacagcacatatacaagataaaataataaacagtataatggtctgtctgccttcttcctctttctcttcttctttctctcccctccgtcactttcttccatagtacatacrgtatttagtattataaaaatttgaaaaaataccaacaattgcatggttgcctcaagtaaatattttactgattattatataactaaaagatgttcattgtggccaggcatgstggcttatgcctgtaatctcagcactttgggaggccaaggcaggtggatcacttgaggtcaagagtttgagaccagcctggccaacatggcgaaaccccatctctactaaaagtacaaaaatttgccgagcatggtggcgggtgcctgtggtcccagctactcaggaggctgaggcacgagaatcgcttgaacctgaaaggtggaggttgcagtgagccgagctcatgccactgcactccaacctggttgacagagcaaaactccgtctcaaaaaaaaacaaaaaaatgttcactgtggaaaaatcagaatgcagacacactcaaaaaaggtaaatgagaattacctatgatcccaaactcaaagataaatactgttaatttatacatatcaatttatatatttatgctatttacatcaaatatgtaaaagtatatttttatacatgttaatttatatctgtccaggtatttctatgcacatacatattttaaacagaaattagatcatatagtactacagctttataacttgctttttttctcagcaatatgcagtgactacttttccttatcatgtataattttatgatgtaatttttatcttttgtattatgaccatcatattccactatatgatgaaccacaaatttatttgaccatgttgttggatatttaaacaatgctgtaacatccttgtttctatgtcattgcccattttcttaggataaatttctaaaactagaattgctttctcagtaagtacacatgttgacttctgctaaatattttcaaatggctttcacaaaatgtcattctaatttgtactccaaagtaaatacttgtctttagggctattagaatctcaagaattaattaagaatccttaaagagctttagtgaaagagattaatgttttagaagaaatgctttgccttcttaaattttttaaaaataaaaacagtgtggtttgcttctgtttttcataaaactatacaagtttcaacttagctcctcttcttaggagccttatctccaagtagtcttgttcttggttctgaaaaattctccttctacgataaccctatgggttaaaacttctggatatggatttttttcagttttattattgcactttggctaatgttaaaagtcaattttagccatcagtcagacagtttgyatctgctagagattgaagttctgagaaccaaggtttggcttaaagaagttttaaagctttcctttggagttagcatagtgcagaagcaacaactaccagctgtctgtatccaaaacagtgaaatcttartaatacagatgtaaaaaagagattattgacttttagacccagtcagrcctcattataagataccatgaaagaacatagcttcatctcattgcttatactagcaaagctttcaataccttttatatgtaatacatactgtaatttgtgtatatagtttaatcatgtattgaatgaagggtgaaatgacaacaaatgaatttttgtttttttgagacagagtctcactctgttgcccgggctggagtgcactggtgcagtcaaagctcactccagcctcaaagttccaggctcaagtgatcctccacctcagcctcccaagtagctaagaccacaggcatacaccaccatactcggctaattttttttttttttaagatagcatctcactatgttgcccaggctgatctcgaactcctggcctcaaatgatcttcccgcttcggcctcccaaagtgttgggagagtgtttcaattattttccccttcattccaacaggacattgtcaagcacagtttagtatagatgaacacaaatacagctctaagggtggagactgtgaaaataatgaaggcccaagttagctaaatgaacttagccaacttcaccctttagtattaggcagtggaactcaaattattgtctctgggccctttacaccaggggtccccaacccccagactgcagactggtactggtccatggcctgttaggaactgagccgcccagcaggcagtaagcagcaggcaagcgagctttactgcctgagctccacctcctgtcacatcaacggcggcattagattctcataggagcgcaaaccctgttgtgaactacacctgcgagggatctaggttgcatgctcattatgagactctaatgactgatggtctgaaacagaacagtttcatcctgaaatcaacagcccctcactcccattcatggaaagactgtcttccacaaaactggttcctggtgccaaaaaaggttgggggccactgctttacactgctaaaaattcctgagaactccaaagagcttttgtttatatggaatatatctrttaataatatgttataaacaacatactttaatttaaaaaaattatgcctgcaaaacaaaaaatttagtgatatgagtggcattgttttacatttttttgtaaatctctgaaatctggcatgataggagcatatctgctttactctgttttatctcacacttcatgtattctctgaaaaattccactgtacactcatgaggggataagaatgaaatagacaaacaagtgtcttagtattcatacaaaaagaaatttgaccttgcagacacacaggggtccccgagtcacactttgagaaccgctgggacaagtcatctctggtcattgagtgtgtaatgatggtccttttttaatcacagattatgacccaatctataggtcctgggaagcttttttccaggtcccagtttgtgatccttgttctcaagtagaagcaacatggtactttctgaaataaatgtayccgttgtcactggcctaggcctggtacaacagagtactaattgtttcctcatcaacccttttctggtccttaactgttttgaagtggtctgtgacatggcatttggttttatgttcttgtttacttttctaaattttttctcacacaaagtaktatttaaatatattcttttacttttgttgttgttgttgttgttacagagttttgctcttgttgcccaggctggagtccactgacaagatcttggctcactgcaacctgtgcctccccaggttcaagtgattcttgtgcctcagcctcccgagtagctgggaccacaggtgcgcaccaccacgcccggctaattttttgtatttttagtagagatggggtttcaccatgttggtcagactggtctcgaactcctgacctgaggtgatctgcccgcctcagcctcccaaagtgctgggattacaggcatgagctaccacacctggcctttagttgttttcattcttatatttgtgcctagcctcttcaattcacaaaataatgtcctactgattctaagtgcttcacatgcacttgactctatggggtaggtattatttattatctttatttacacatgaaagaactgaggcacagtgaagttaaataatttatytgctttttggtcctcatagtaccgtatccagtgcctggttcataatgggctttcaaaaaatatttgttgatgttatgtgcatcaagatctgtcccatggaaaayaatggttggctatgtaccatactgttaccactggttagctggagatgcaggtgggaggataacaggtacaaatgggcatggaaagaaggtataattaacttctttaaatgtctttcaatcatttcacttgttacaatgagcaatccagtagtaatttttaatctgtcccgtacttgcttgccttctgtattttcttttggatgaaatgtctgttcaagtcttttgcctatttgggaattggatttgttttcttactgttgagtttcaagagttctctgtataatctacatccaagtcttttttgggatatgttatttgcaagttttttatcagatatgtgatttttctccaataatatttttcacggagtaaaaatatttaatattgattaagtccagttgattgatttatttccttttacaggttatgcttttagtgttatgtctaagaattctttgcccaacctaaagtcacacagattttttcctaagttttcttttaaacattttatagttttacattttacaattagatctattatccattttgaataaatttttgtataaggtatgaagtttaggttaaggttcattttcttcatatggatgtccaattattccagtaccatttgttaaaaagactttgaactgactttgcaattttgtcaaacacagttggctatattaatatgggtcttttcttggactctctattctgttgcatcaatctgtgtctttatcctttcaccawtaccacattttcttgattacaacagatttatggtaaattttgaaatgattcttccaactctcttcttgtttttttcaaaattgctttggctattctagttcttttgccctttccataaaagttttagaatcagtttgtctatttctacaaaaaaattctgctgagatttttatttgaatttcattacgtttattgatcagtctgaggagaattgacatctttactatgttgagttttccaatccataaacatgattatgtctcyccatttatttaggtctcctttgatttgtttcatcagcattttatagttgttagcagtaccctacacatgtgtttttggatttaaaaccatttccttgtttgtggagctgttataaatagtatttttttattttggtttgcaattgtttgtcattgttatacagaaatatgattggtttttgtttgttggcctggtacctgcaacattgtgaaactcacttactagttctaggtttttggatttttttgttgctttttgttttatatacaggcagttttatttctttctttctactctgtatgacatgtatttattcatttatttatttttgctctactgctctggctaagacttccagtatgaagacaaataggagtggcgtgagtagacattcttcctttgttcccagtctttggggaaaagccttcagtctttcaccattaagtatgggcttttcatagatgtcttttaccagtgtatggtttggctctgtgttcccacccaaatctcaccttgaattgtaatccccataatcaagggcaggaccaggtggaggtgattggatcattgggatggtttcccccatgctgttctcatgataatgagtgagtctcaggagatctgatggttttataagtggctgacatttcttctgcttgcatttctctctcctgccaccacaataaagaaggacgtgtttgcctccccttccaacatgattgtaagtttcctgaggcctccccagccatgtggaacatgaaaacataagttttcaactcatttgagtagatatcaaaaagcaaacactggattgtaaggatacatttagttttgtaagaaactgccaaactgtcttccaaagtgtctctaccattttacattcccaccagcaacaaataagaacttctattatttcacatccttaccagtgtgttgaaccagctttgtgtacctgggataaatcccacttggtcatggtatataattctttttatacattgttgaatttgattttctgatattttgttgaggatatttgaatctatgctcttgaaagatattggtttgtggttttctcttcttctaatccctttgtttggtttttgtattaggataatgctgacttcatagagyaagttagaaagtgttccctttgcttctgtcttctagaagagattgcaaagaactggkataatttctttcttaaatgttcagtaaaattcatcagtgaacccatctagacctgrtgctttttgttttatcagagccccccccggactgggcccccaggagtttcttwcygtcatgctaatccacactcagcttcctgcagttcattaaaattaccacttaagcattcctaccagtttatggctccagtagcatttgttccaggtaagctgatctggaaaatgattctctgtagttgcctgtatttccagatttggggatggcactttaccctatgacctcaactctgtaatacatctaaaaaaaatcatttttttccagtttgtttagcttttttcttgttgcaaggatgaattgatgactttcaagctctttacatgttagaagtgaaaccagaagtgccctcccttttttattcttcagtttcctctgttttgttttgttttgttttgtttatttttattttttatttttttattattatactttaagttttagggtacaggtgcacaatgtgcaggttagttacatatcagtttcctcttttttgcattattttggattatttgagcattttttagcatttccatttaatttatctattgtgtttttgacagtatctgaatagtgttttgtttcactgattgatataggaattacaatatactttttaaacttttcatagtttatttagagttaatattttatcatttcaagacgaatatagaattcttacatgtatgtaggtccttttacctcttccctttgtattctagccaatttgtgtattacatctacatatattgagaatcccctcagaaaaatgttaataatttttgctctcagctgtcaaacacattttaaggaactcaacaggagaagactctgttatatttacccagatatttaccattcatgttactctttctttattcatgatatttcaggtttccttctggtattatttctcttctagctaaagaacttccttgaatgatgattttagagcagatctactggccacagattattttagttttccttcactttagaatgtcattatttaacctgcatttctgagggatattttcactgaatacagaattatgggtcaacagttcatttcttgcatcactttaaagatgtttgttccaccaaattctgttctgcatggtttcttttggaaaatctttacttattcaaattgttgtttccttataaataatgcattatttttctctacgattttttcatcttttgttcttgcaagtttgatttgcatgagtaggtatagattcctttgggtttactatgtgtgatgttgkctatgcttcttgaatctgtaggtttgtgtctttcaccaaatttgggaggtttttagacattatttcttaaattattttatcctcaacacattccttcttctctattctaggactctagtgacatgaattttagacctttggtgttctctgtcacctccattctgctactgagcccttgcagtgggttttaaattttgattattgtatttttcagttctaaaacttttatttgtatttatttttatgttgaagctttctgtcttctcatttatttcaacagtgtttgcccttctttcagcttttttacaataactgtttaaaagtctgtgtcaaataattccagtgcctgttatctcagtattagcatctgttgattgtcttttcccgtgcaagttaagatttgtatgattctcttatgccaagtaatttttttttattgtatcctaaacattttgaatattatgagtctctgggtcttatttaaatcctatgaaaaatgttatgttatagcagacaacccatttgggttcaggccacaagttctgatcacccttctgtgggatttggtttcaatcttagtcttgttctcaatgcatttgcattgctatttgtatctgtcccatgtatacgccacccgctgtccagcgtgggacctggctgttagactattttttttttttttttttgagacggggttttactcttgttgcccaggctgtagtgcaatggtgcaatcttggctcactgcaacccccacctcccrggttcaagagactctcttgcctcaggctcctgagtagctggaattataggcatgcgccaccgcatgtggctaattttgtattttttagtagagacggggtttctccatgttggtcaggctggtctcgaactccgtacctcagatgatccacccacctcatccttccaaagtgctgagattacaggcatgaaccaccacgccaagcctagactatcttttagttaagttctcagagtctttgatatgcagtttagcattggattgacacatgcactgactttatggrttcccttttccctttacagtctcctcaataccttctattgtcgtgggcctccccttttcttcctccagccagaacgttggatctttagttacactgttctaccatgcactttttgcaactgtgccctcattcagagccatgctgggatagaaaagaaagggggaaaagcagcagggttttatcccattctcttggggccacagcttctcagagttgtttatcaatactaccatttttccaaacccctttggagattctcacatatgtactgttctgcttttcctcttttaagatttctgtataactagtgagttgtctcaaactggcttatgccaaattgtctcatgtagtaggctatctcatttctttcaggttctgttaagatccttttttaaaaaacaaacatttagatggtamtgaataattctcagcatgagcaaatttttttctttaaaaaaagatttcttaatagttggcaatgaattgctattagagagaataatgtatttcttgggaaaagcactgtgccttgatatggttcaccagagagaagttgaaaaacagtaccttaggaacatcctcaaatcacaaaaggtgatcaccaaactgctatcttgagataagaagaaagggagggattggtattgagaggtgcagtggttgacatgacctatctccaggatctcttaacagccttcagtaaagttgtgctcttgtgggtgctgtttggttggagactcaggatggcagagattcaaattatttktgcatggtgtaggccagaggaagctagagcacaagaggcaaaggaggcctgatgatcatgagacatgctgacaattagcagaaattctttggagagatttagatttctgtggggtgtggaggggtacagagatccccagctgacagatggtgcataataggctagtacctgatgcttaaatcaagctaataaaaggtatttggctcagttaatctgagaaaaaaaaaaagcaatactggtagttcatggagtcaaaaggagagtgtattttactctaaaagcttgttgctaaataatctctaaggaagtctatctgttttctattcactagttataaagtactccctcttgttcttcttgccaagaatttcaactgaatgatcaactgcaagacaaatattcattcatcaacttttggagagtaatattttcactagttactgtcattatgctttatgtagcctttatcagagctctagagtttttatttgttttttttttgtttttttttttttgtttttttttttttttgagacggagtctcgctctatcacccaggctggagtgcagtggcgggatctcggctcactgcaagctccgcctcccgggttcacgccattctccttcctcagcctcccaagtagctgggactacaggcgcccgccactacgcccggctaatttttttgtatttttagtagagacggggtttcaccgttttagccgggatggtctcgatctcctgacctcgtgatctgcccgcctcggcctcccaaagtgctgggattacaggcgtgagccaccgcgcccggccgagtttttatttgtttagatgtcatccttaattcagaaacttttctctaatttccagtataggaaattgtattatctgttttcttacagtccagatactgagccttttgtactcattaaactgctgctgtcatacaacccttaccctactttatcaattaataactctagacaacatgcttctttttccctaagatgtcatttaaacatgtagagcccatggcaagtaattattaatccttaagctttctatgaatacttatctagtgatattaaaatctttcaatggcattaatgctatagcacagtatttatgggctcagtttattcatataggtcagattaactcagtttgcatattttgaaaactattccttatttatttaataaatgtttttaatggaaataatgtgtgaggtgtgggatgtggagtaaagttagacatgacactcattcccattgatttattacagtataatatcccaagtgagataagatatcattgtaaggaagaaggtttctgcttagaaacagatattgggcgtaaattatgaactgctttcacagtcattggcaagaaaccttgcattcacttaggattctcaactctgctgatgtggtttaatccttcctgtgtaacttgggattgttatccttttgttacctaagaggaaacttcaggttcaaataccacaggaggtagtgggtagtaacctgccagagataggaatgcagrgcttttggggatagtactctccaatgtcccttcaatacatgttagatatttacctgaccaaaaagaggtttctgaattctrctattgtttgtttaactcaagttggagtctttaggtcaattcactacattaaaacaaatggaggctgggagctgtggctcacgcctgtaatcccagcactttgagaggctgagatgggaggaccacttgagcccaggagtttgaaaccagcctgggcaacatagcaacacaccatctctacaaaacagatttaaaattagctaggtgtggtggtgtgcatctataatcctagctactcaggaagctgaggtcrgaggatcacttgagcccaggagtttgaggttacagtgagctatgatcatgccactgcactctaggctgggcracagagaccctgtctctaaaaaacaataaataatacttaaaacaaaataaaaaccaayggaaaccaattaaaggttttaaatgaacaaatttgctctgccccaaattgtatttatatttcataagtttttttattttggcatttccgaagaattaccttaatgtgaggtcccttcatttattttaaaaccacttgttaagggtatttgggccaattatcagttagtcagattagttaataaaattatacagaataaccgacatactaggaaccacttatgcttgactaaagtaagtatatatccttttcgtgctttttcactctaactcttctacgggtagtaggagatgaaggtgactctagatcccaccaagtcattttttaagcaaatatttgtatgtgctatatttcagacactgctaggacctttatcctacctcatctcattttaccttcaaaagagcctcatagggctcataacttagggactagctgtcrcagatttgtttctcacagatccttcagataattagcactatttccatgtgataaatgaggaactctgtagttcaaaaaaattaggttatctgcccaagatcctatggcaataaatggtgagattgtttgtcacaccagtgagcctatgctgtttccagaataccagcttctaccagcagtgattctaacccgaagtactaatcactaggacaaggaagaaaaaaattaacttgactttcagaggcctttgattctaaataacaatattcatcttctggagctagttacagcatatatcacccattctcatctttggaatactttctacactttttttttttttcttgagacagagtatcgctctgttgcccaggctgcagtgcagtggcgctatctcggttcactgcaagctccgcctcctgggttcacgccattcttctgcctcagcctcccacktagctgggactacaggcgcccgccaccacgcctggctaatttttttttttttttaatagagacagggtttcaccatattagccaggatggtctcgatctcctgacctcatgatccacctgcctcagcctcccaaagtgctgggattacaggcgtgagccactgcaccckgccactttctacacttttttaaagaagtgtaccatcatggaggtacatwccatggaggtacaattactcgaaaataatcattcttttgctccactgagagttctgaaaccaaaacctactctgtaattccacacattgaattattacctaattatacagtgggctgtctaatcagaatgcctgggttcaaatccctgctcagtgacctaagcaagcagcctaacttctaagcctcaatttcttcacctgtagagtagaaataacaatatctacctcagagttattattagaattaaatgagataattcatggaaagcactcagtatagtgcctgacccttagagagtgctcaggaaatagtaggtgtgagagagggaagtgggggtgcatggtactagggtagtattggtaaggcttgacatgttactcaagcagcacaaactaagcattctaaattaaattgtcaaaacattagttatacagttctcttgatctaataacctcwaagtaatatttgaaaaaaaggcaaatgttaatttacttcagttatgttatctatgacctagaaggaatgtagacatattcaataaatttgctagtggtactagaaggttctgttttataagctgttaagaaaaggagaaaagtgtagccctgtttaaaaaaaaaraagttctttagctgaatccagattacaaaatgcggaggctggcagacttagctactataaatttagcattcatagagaaagaggaggagagtggacaagattaccttttctatgttgggaatatatagtcatggattctggactctctccagaatctttttatttctttttttttttaagctgacaagagcatcttggaacagagaaaagctatgcattcataagttatttatttctattggaaagaaagtttaaggagcaaagttccttgggattagcataatgtagttaaaaagccaattcaccatagttgttacatatggcaacgaagccagtgcaaagacagttgcccttatacactggcaaccaagaaactacaaataagcattctgatactgtaaccatatctgaaaagcaggatacaaaaaccccagtagtaggatttcaggtgaagctttgtgaaagaagatgcataatttctacatagttgtctgtatttctttaaaggtagttttaaacaatgtcattttcttttaagaagttattaaatgaaattaataataattatcatagtgaatttttcaaatacctaatttgtgtttatatgtattgttcaayatataaaacattttaaagaaagaaaaaatcactggtagtcagattatcatcattgttttygtctaccctctcatacattaatatatagatgcttttcccaagaacagaatcatgccatacctcctttttctccctttctcttttcagtatactgtcaacatttttcacattattaaatattcttttgtaacatctcttttgatggttatataatattctatcaagaggatattgcataatttaacatggatctttgtgaagaaattcatcccatttttaattataagcctttcatcagtgaataaatttttagttgatattttgtaaattcattgttatttcctgcatcaggtaggcttttaaaaaaacttttttaaaattgagacataatttacatataagacagcacacagttgttatctgttcactttgatgaatttttgacaattttatacaccaatataaacaccatcaaaacaakgtgtaaaacatttacatcaccccagaacattccccccattcccctttctagctagtcccctccccacaaccactttctgatttctatcagctcaggaatgactttgataaaattattactaggttgcactgtatgaagttgaatcatttatacctgtaccagcaatgtatgaaattgctagtttctccttaccctagaattatgtgtgtacatactataatgtgtcataaataacagatatatagtaatcattgccaatttctaccttgtattaatttctatttatttgtttgctggtagttgaactttttcagtgtgctaactggccatttatatttcatggttgtggtcacrgttgttaattgtctactcttatgtgtatatcttttttatttacaaaagctctgaaattttttttttttttttttgagacagagtctcactctgtcacccagagtttactgccagtttcaagcaattctcctgcctcagcctcccgagtagttgggactacaggcgagcaccaccacacccagctaatttttgtatttttagtagagacagggtttcaccatgttggccaggctggtctcaaactcctggcctcgagcgatccgcccacgtcagcctcccaaagtgctaggattacaggtatgagccacggcgcctggcctatgaagaatattattttttgtttaraatatttttaccagtttgtcattgccttamaatttgtttatggtgactttgttttgttaacatggagttttaaatatttgcattgctaaatttgctgatcttttccttcacgatttctacctggtgtcattcttaagatcttcataatcccaagattatataaatacctagttatatctttcagtagtattttcatgctttttatttttaatttacatcaaaaatccacctggaattgatttgctttattatattaggtcattgttatcatgtttttttttctaaattgttagccaccacaactgaataataccgtgtttccccatggatattaaatgtgttctttatcagagtaaggccttatgtatattttgagtgagttttattattttacattgatttctttgtctattcttgtgccagtacctcactgcttaattgttgtagcaatgtaatactgtttagtatcttttaaggcaggttgaacctttactgttctacacttatatttttactttgaaagtttaagtggtagatgatgtgctacattcttattttcttttagttaccacacctggaaaaagcttagactatagctatggagtcaataaaaaggcctaattatttaacaggtggccgctacctgaattgcagccccagtgccaagaaggaaataattagtttttagacaaacccttcaaagtaatggaaaagatcacatgtggaaaataaatagcatgaggaataaaaaggagtgaaatctagcatgcttgattgccattttctggtatgggcatataaatgtttttatgagacatttgattagaattttttccatctccctggtacactgagcaaaagcacaaagaattgacaaagttgcagaaggtataccatcttactttcttctcttttacctggtrtgtatccccaggacatctaggatacccacatataaatgcaactcgcaaaatccccctccaaaaacatatgttaataatctttcaaatacctgccattttgatttatgaatatcccttctactttctggtattcattcaggtaatcaagttaaatgtaatagtaatgttttattatttgcgtacagataatgcaattgatcacaataagtaaaacgttgagctgaggtttttttagtakaaataaaagttaaagtaagaaactcttactgagcatttacaaagcaccaatctcctttaaacctataagctagaaagtgttgttgtgcccaaattatactggggaaaagtctagtgcccaaattatactggggaaaagtctaaggcacagaaaggttaagtaatttggtcaagatgtcataactagaagtgatagtgttcagacatagccaatcatgcttggctcaatagtttgattccatttgtttttgaagacattctctcttgtttgtgattttgtattgcttatatgtaatatcacattttctgctagaaaaaaaatcattcctagtttatatggggaaacatagtgcatcagtatttttatggcattctacatagaaatcgtcgctttcagaggttctcccacctaagtaacagtttctctaagttagctaggctacttatttttcctattttcagataaggcaatgtgattgttggtgttgttgttgttttaaactgtagtaataaggccaaacaaatgacttcaggacttaattcacgcttagtcaaaaactgtctaagtcccctttaaattgtagaaaatgtcaaatttatatccctaatattatatcctctgtattatttgaagaattaaaattcagaaagttatttaaaagtttgtttaacttgaacaagaagttcctgccacatttacccctaatttttcataggaatataaatagtagagtggttatgaatatgggatttggagtcagayctgaatttgaatcccaacttggaaacttactagctgtgggatcttgggcaaattacataacctttctaactctgtgccctaaagtgtaaactggggataataatagtacctttttggtaggtcagtttgtggattaaatgaaatactatttttaaagggtttagtatggtgtctggaacaatccgtgctcaataaatgtgttcttgttttcatcttcagtgtagtcattattatttttaagaattaatttatctatatttgaccactgtcagtagatctatcaagatcagatgattacaatatataccatttctataatatttgactgttttatgaccttttcttaaattaactcataataactctcagtgattaacttaaggttggtttctatcataattcttaccattctgagataaaaaaatttttgagttttgatattttttcagtggacaataatgcctcattaatgaactgtaggctttttccttgaggctagtactaagaaaaagtaggggagggracacagataaaggaacattcattgtaaatagaatttaaatataaagcaaaaggatatcatcactttggagaacatagaattataagctcagtgtaatgtaaatatttttattccattcctctctcttagccaagttctaaggttgtgataaaatgaagcaagaaggaatatgattatagaccaggttctctggttagtgttcattttatacagaactataaataatgctgcaaaagaccaacgtggtcctttataaataggtcgttgtcagagttgctgaccctggaattatgattatttgaattctaaactccctgtccagttcctgaagtcacctctttttcttcctttttcttcaggatgaagacagctcttctgtcttaaccctgcgctttcatatggtttgccctgaaataagtttctgtcatgttggggaagtttgctttgtttgtggatctgttttgagagagatagggagacagccatgtaccccagctgcttaccaggcctttttgatagggaatctcatcttccctatggaagacagttgttctgttagtctactggctgtaggttaaatgttattggctgagcrgttgctgaaaccccagggcaggtgtaagaatgcatattacagatttgttctggaaaggctcttamatctttccacctgtgtcctgctgagtgttaagcacaatgttagataggcaagaaagctgagaaactgtgcattcccctgttgctaaagatattttgaaacctacgtctttcatatttactccaacaatactaaatatttacagaagacactatgaggatttcttttttaactaagggatacaaaagacgtgttttagagttagcctttcaaaactccaaactgagggggcaatataacattcctttaaagttcagaaacaggagatttttccatgatagtggtgaacagtgaaagaaaagccactggttttcatcttcgttttcttttttcaaaagtcagtttccattttcctttttgcttgattttcctaatgctctatttttctattcttatttttttgttcaagtattttaaaattttttgttcttatttttctcttactgttgatttttaatttctcttttgagttttttgtttttttaccatttgtatctgcatttttctctgcttcctttaactatttctgtttcctattctgaatcttctttcatcttttgcttttctccattgatctctttctctcctttggccttttctattactcaaagtcatccctgctctgctaaacatgaagagttccagtggccttattttccagaactttttttttttacatagtttgatctctgagctcattcacattttgtctgtctgtgtctcttcatatgagttactgtgatctctactatctacttcatgttgaaaaaagattcagacttattttttcagatatgcttgtacataaacactttttaatttatttctccccctcccttttttgttgataaataataattgcacatatttgtggtgtacatgtgatattttgataggtggatacaatgtgtaatgatcacctcaaacatttatcattcctttatgttgggaacttttgaactcttctagctattttaaaatatacaataaatttttaaccatagtcaccctactgtgctatcaaacactagaacttactcttctaacggtatgtttgtatccattaaccaacctctctttatcctctccacaccacccttcccagcccctggtaaccatcattctactgtatacctccatgagatcaacatttctagctcccacatgtgagtgagaatatgcagtatttcatccttctctgcctggcttatttcacttaacatcatggccttagttctatctgtgttgctaaaaatgacaggatttcattctttttttatggccaaatggtattccattgtgtatatgtaccacgttttctttatccattcatccactgatggacacttaagttgattttgtttcttagctattgtaaatagtgctgcaatgaacatgtgggtgcagaagtcctttcgatataatgatttctttcctttggatagatactcagtagtggaaatgctgggtcatatggtagctctatttttacctttctgagaaacctccatactgttttccatggtggctatactaatttacgttcacaccaacagtgtataagagttacctttctctgcatcctcaccagcattcgttatttgctgtctctttcataatgaccattctaattggggtgagatgagatctcactgtggctttgattcgcaggtccctaatgattagggatagtgaacatttttctacatacctgttggccatttgtatatcttcctttcagagatgtctattcagatcctttgcctactttttaacaggattttggttttttgcttttaagctgtgtaagctccttttatattctggatatcagtaccttgctgggtgaatagttcataaatattttctacattcaacaggttgtctctttactctgttggtcatttcatttgctaggcagaagctttttaatttaattaagtctcatttgtctgtttttgtttcattgcctgaggtgttaaccataaaatttttgcctggaccaatgccctgaaatgtttcccatgtgttctctttttatagttttatagtttcaggtcttatatttaagtctttaattcattttgagttgatttttgtatatgatgagagatggaggtctagttttattcttctgtatatggatatccagttttctcagcatcatttattgaagagggtgtctttttcccaaagtatgttcttggcacctttgttgaaagtcagttggctgtacatatgtgcatttatttctgggttctctattctgttccattggtctgtgtgtctatttttataacaacaccatgctcttttggtcactataactttgtagtatatttggaagtcggagagtgtgatacctccagctttgttctttgtgctcggtattgctatggctatttggtgtcttttgtaattccatacaaattgtaggattttttttctatttgtatgaagaatgtcattggtattttaatagggattgcattgactctgtagattgttttgaatagtatggtcatattaacaacattaattcttttgatccataagcagaggatgtcttttcatttgtttgtattctcttcagtttctttcatcagtgttttgtagttttctttgtagaggtccaccttggttaaatttattcctagtttggtgtgtgtgtgtgtgtcgctactgtgaatgagattactttcttgatttctttttcagatagtttgtcattgctctacagaaacactactgatttttgtatgttgggcttttgtcctgcaattttactcaattcgctttccagctctaaaagtgttttgtggagtcttcaggtttttctacatataagttgatgtcatctgcaaagagagacaatttgacttcttttctgatttggatgcattgtatttctttatcttgcctgattgctctgactaggacttccagtaccatgttgaataagagtggtaaaagtgggcatccttgtcttgttccagttcttagaggaaaggctttcaccttttccccattcagtatgatgtcagctgtgagcttgtcacaaatggcctttattatattgaggtatgctccttccgtgcctaattttttgagagtttttaatcataaaaatgtgtttaattttagcagtgcttttcttgcatcgatcaagacaatcatacaattttggttcttcattctgttaatgtgatgtattacatttattgatttgtgtatgttgaaccataactgcatccctgggatgaatcccacttgatcatggtgtgtattatctttttgatgcgttgttggatatgctttgctagtattttgttrtgaatttttgtatctatgttcatcactgatagtggcctgtagttttctttttcttgttatgtccttgtctggttttggttaccgggtagtgatggtctcatagaatgaattaggaagaattcttttatcttcaattttttggaatagcttgacaaaaaaaaaaatagtgtgtgttctttataattttggtagaattcagcagtaaagcttgagcttttctttgttgggaaatttcttattactgattcaattccattgctttttactggtctgctcaggttttctgtttattcctagttcaatctccagaggttgtatgtgtctaagaatttattcatattttctgtaggtttccaatttgctagcatatagttcacagyagcctctaaagatcctttctatttctgctgtattaattataatgtctccttctttctcattttatttattttgggcatttttctgtttttctttgttagtcttgctaacaatttatctattttgtttatcttttcaaaaaaaccaacttttcattttgaagattacttgtattgtttgtagtctctgttgtgtttaattctgtctaatctttattaattccttttttctactaatttagggtttggtttgtttttgctttttaattccttgaggtgcataaatcgttctacttttttgatgttggtgattattgctataagcttccttcctagcactgcttttcctgtattccataagtttgggtttgttgtatttccattttcatttgtttaaacaagtttattttctccttaatttcttcattgattcagtggtcatttgggagcatgttgtttaatttccatgcatttgtacagtttccaatgtttcttttgttattgatttctagttttattccattatggtctaagaagataggtgatatgattttgatttttttttaatttattgaggcttgttttgtggcttcaactatggtctattctggagaagattccatgtgctgatgaggagaatgtgtatcttcagctgttggatgaaatgtgctgtaaatgtctgctgggttcatttggcctaaggtgcagtttaaatgcaatgattccgtattcattttctgtctagatgatctctccaatgctaacagtgggttgttgaagtctccaactattattttactggagtctatctttccctttagatctaataatacttgctttatatgtctgggtgctcgaatgttgggtacaaatatgtttagaacgttatatcctcttgctgatttgatcccattatctttctataatgacctttgttgtctcttacaatttttgacttggaatctgttttatctgagataagtatagctatttctgctcactgtttggtttctgtttgtgtgaaaaatctttttccatcccttcattttcagtctatacgtgtctttacaggtgaagtgagttcgttataggcagcatattgctgggtcatttttaaatctmttcagtctggctttrccttttaagcagcgaatttaatgtgtttacatttgagattattattgataggttaggatttattcctgtcatttgttcattgttttatagttgttttgtatatcctttcctcctctcttcgttttttattattgccatttcccttccctttcttcttctcctattttttgttgcagttttatgatcttctgtagtggtaatgttagactcctttctctttctcatttgtgcatcttctctacaatgagttttatactttcatatgttttcatgatggtagatattgtccttttgttttcaggtatacgagtcccttaagcatttcttgcagttgtggtctagtggggaaatccctcaatttttgtttgtctggaaaagactttatttcttcttcatttttgaaatatagccttgctgggtacactattcttgactagcagtatctgttttcttttagcattttgactgtatcatcccagtctttccctgcctgtaacgttgctgctgagaaatctgctgatagtctgatatgtattttcttatatgtgacttgatgctttgctcttggtgtttataaagttctctatttttatttgactttttttttttttttggagacagaatctcactctgttgcccaggctggaatgcagtggcatgatcttggctcactgcaaccactgcctccccagctcaagcgattctcgtacttcagcctcccaagtagctggggttacaggcacccaccaccacactcagctaatttttgtatttttagtagtgacaaggttttaccatgttggccaggctggtcttgaattcctggtctcaagtgatctgcctgcctcggcctcccaaagtgccgggatttcaggcatgagccaacatgcctggccttgtctttcacttttgacagtttgattataatgtggcttttagggttgaatgtatgtcgcactccttgagcttccttccttccttcctatgcctcttgtaagacttatgagtttttctgctcagctattacttgttaaatatgttttctatgcttttgcccatctcttcttcttctgaaattcccagaattctagtatttgggcacctcatggtgtcccatatgttgtataggctttttttttttttttttttggtgggggggtggtctgatttggtattcaaaagccatgttttcaaattcagaaattctttcttctgctaaatctagtctattgttgaagctctcagtttttttgtttcattgattgaattcttcagttttagactttctgtttgatacttttatatgatatctatctcgttgaatttttcattcagatcatgaatttgttttctgatttctttgtattgtttatctctgttctcttgtatctcacttagtttgttaaatatctttattttaaattcttttagtcatgtcacaatttttcctttatttgttatctgttactggagaattattgtgttcctttgaggatgttgtgtttcttgctttttcatgtttcttgtgyccttacttttatatgtgcacagctggtctaccaattgcttctttcatttttatggattggccttcagagggaaagactttttcatatatatatatayatayatacatacayacacacacacacacacacacacygttggttgggtagggtgcttcagctttgcttctgggtgggtgcagtagtatagacttcttagcctgtaatcagctagtcagcttcagtgttgtctgttgagttcctcagtgattaggccgcacttgttagtgtaggctgtggtgaggcttctttgggtataggcacaccaggtgggttgatccatgggtaccagtactggcagtagcaggcagggcaggcctgtcctcaagttcctagctggcatgcaccagcaccagaagcagcaggagtggcaaaatggtacccaggctcccagatggcacatttaggcacccatggcagtggctatgggtggggcagattaatccccacacctccagatggtacttgcaggcactgacggtggcagtgaggaaggttgatccctgggccccaggatggcatgctcatgcacatacacctgtggcagtagcagggcagacttgtcctcaggtcccacatgacacctgtgggcattggcaatggcagacacagcatgcttaacctcaggcccctggatggtacatatgagtgcccatagcaatgggcagggcaggtcagtccccagaccccagataatgtgtgcagataccactggtggtgacagatggggcaggcctgtcctcaggcccccagacaacaagtataggcactaacagcagtagatgaggcagtctgatcccctcttccctggacaacacacactagcactggtagtgggtgaagtaaacctctctaaaccctgtagtttcttaattcctaaagaatctgtgaacaattatgaaaagagaaccctaagttacttgtaatcagtaatagagaaaagccctaaaattaaatattcataaggcttttcctaaaaattacatttgatagttataaaatatagaaataaaagcatccaagtaatattttaaaacatactctagaaatcctaggaaaatatcaaaaatttaaaacaaaacwgccatttatattttaaacagtagccaaagcaaaccgagagtcataggagaaaaactggttttgatatttagkgttagtaatgtcatcattctttatatagcttgttttaattaactcatttgaaatgaatctaaagctttgtgatttttgtgttgcttgtgatttcttaacattataataagtgccaaatgtttgttagcatagtcaacaattatccagacactattttgttctttgtttttcaatagctgcaaaagtacctgtaaaagtattagtcatatttaggcttccaagttttccagtgaactaggaatctggcttcagcttggcaactaattctgagacctttagttgcacatttgtaaaatggaatacaggaagctaagttacttgcatatttaaagaatccaaggctatctaccaaaagttctgagaggtcagtattgtgaccagatacaaaataagtacacaaaaagtcatagttgctctgaaacaaccacataatttttgaaattatgaaaacataatttttaagattctaactcaccaaatataaattacctggcaatagcctttataaagatttattaaaatctttatgtaaaattaagaaaactgcaacctattaaaggagtacattgatatactatgtttctagaatacttaatttttgacaaaaaccaaattacctaaaaattattttataaacctaatataattcaaataaaaataccagtagaaggagggagagaaacatgcaaacaaatatagccacaaaatgttctaataaaaagagtagggaaacataatttctcactccttaggtatggattacrcatggtgacttcctttcaaagtgtacatcatggaaagcaagaaataaaagagtaacttcaagcagaaaagataactgttaggtattgggcttaatacatggatgatgaaataacatgtacaataaacccccatgacacgttacctatgttacaaaccttcacatatacccccaaacctaaaatacacgtttatttaaaaagacagaaagaaagaaagaaagaaagaaagaaagaaagaaagaaagaaagaaagaaagaaagaaagaaaagaaagaaaggagtaattttgcagtgtagaaacctgacaagcactacctcagtgaagtgatcaaggtcaacattaacagtcataaatcatgttgctagtatgtacccttgaaacgatgtgatgctaatggcattttacatctaaggcctttctcccaataacccataagcccagtcttatcatgagaaaaatgttgaattgcagccctgtgacatctgaccagtattcctcaaaactgtcaaggtgatcaaaaacagagaaattctgaaaacttgccacagccaagagtaggctaaggaggcatgacaactaaatgtaatatggtatcctgaatgggattcaggaacagaaaaaggatatcaagtaaaagctaaggatattgctctacttgggttgctataaacaagatctcacagactgggtagcttaaacaacatttattttctcacagttctgttggttggaagtccaagatcaagatgctagcaggattggtttctggtgaggtctcttttccaggcttgcagacagccatcttcttgctgtatcctcacatggtctttcttctgtgctcatgtgctcctcatgtctcatcattttctttttttttttttttttgagatggagtctcgctctgtcccccaggctggagtgcagtggcacaatctcccctcactgcaagcttcgcctccyggattcacgccattctcctgcctcagcctcccatgtagctgggactacaggcgccagccaccatgcccggataatttttttgtatttttagtagggacggggtttcaccgtgttagccaggatggtctcaatctcctgacctcgtgatccgcccgcctcggcctcccaaagtgctgggattacaggcgtgagccaccgtgcccagcctcatcattttcttataaagatacaagtcctattggattgctgtcccacccttatgaccttatttaatcttaattgcctgcttaaaggccctatcttcaaatatggtcacatagtatatttgtatgtatatgtatgaatgtattcaatgtatgaattttgcaggaacacaatttggtccataacactaaagaaatctaaataaattttggactttacttaataacaacctatcagtattgcttcattgaatataacaagtgtaccatactaatgtaagatgttagtaatacaccagagtagtttgagggtacaagaactctctgtactatttgctcaattttgtgtaaatctgaactgttctaaaaatagtctattaaaaaatacacaaattttgagacatatgtttaaaaatgagtaacaggatcatgatctttcccagtcagatagatgcctaagtatacaacagagttacaataattaaagcagcagtgtaccgtacagggtggattatttaagaaatgaagttgggacagtgaggtagccatttggggaaaataattaaattagaactttatccgacccactatactaaaacaaacttctgaactgattaaagattaacaaatgaaaaaagaagaaagtgctagaagaaaatataggtggatatttacatggtctcaatgtaggaagtgatgtgcctatgtattacagtagttcttgatgagttatggtaatttttgtttactttttcttcttgcctcttaggattgtcctactttgcaaaaagaaaaacaaaaacagtgaatgtatattgctgaagctatgaaagttataaaaataaaataacatttctataattctttgattctataaatagtgtctgccctccaaatggcttaagtctagtgtagataggacatatttagaaatatacgtataaacctccaaagtgagttgggatcaaataagttatatgtgtatgatgatgtacacaaaacactttgaaaggggtatgtagttgtctatgcccatttatatttccataaaggaatgcctgatgctgggtaatttatttaaaaaaaaaatgaggcttatttggctcacagctctgcaggctatacaagaaggatggcaccaggatctgcttctggtgagggcctcaggctgcttccactcatggtagaaggcaaaggggaggtggcatgggcagatcacatcatgacaggggagtgagagtgaaagggaaggtgccaggttctttttaacaaccagtactcaaggaaactgtcatagcaactaatagagtgagagctcattcattaccacaagatcagcaccaaatcattcatgagggatccacccccatgacccaaacacttctcaccaggccccacttccaacactgggtatcaaacttcaacatgagacttggcagagccaaagaaaccatattcaaaccacagtagcagtataatagagtattataaaaatgtaaatattcaaataagcacagtttatatgcaacacatagacacactattatggactgaattgtatctccctaaaactcatatgttgaagctctaactgccaatatgatggtatttggaggtggggcctttggaaggaaatgcttaggtttaaatgaggtcatgagggtgcccccgctctccctgcatccctgtgttgtgattagtgtcctcataaggaaggaagaaactaaaactctctctctctggcacatactgaggaaagctcatgtaaggacacagtgagaaggcaggcatttgcaatccaaggagagagccctcaccagacactgactgatggcaccttgatctgggacttctgtctgtgagaaaataaattgctattgtttaagccactcaggccatggtattttgttatggcagcccaagctaactaagacacaaagtacaaaataagttaaaatgataataaatgtttggattgcactttgccatttgcagagccctttcaaatccatgatgtttgatcctcaggccacgtgaggtaaataggttgcacattaccacccctctccacaggtgaggaaacagaggcctgagaagcaatgtgactttctccagtaatagtgactgaatgtaactcaaatcaaactcagggcttctgagtgcataccacagaggtttcatagaaggtgttaaagaaattcaaaggcaggaacaaatcctgaggcccagggcagtcagaaaagaattttaggaggaaatgggaattaaactgggctttgaaaaaaacagggacatacaccagtgggaaggaggcggaagggcgtcccagagaagtgatgtggacaaaagtatgctgcagcccacctatgatacagagcaggtcctttcaaaggatcagatgtgggcaaaacttgaaaattgtttggtcttgctgagatttttctttaaaaataaaaaggctggttttgctttttaaatacaagtctcctttcaaccctacccctaaaaaacttaaatcagattcattaaagtttgtaatccacagtcccatagaatgacawtcttagtaataactaggagctattttgttaggtttcttagaattctaacttaacagagaaattagaagctgtcaacacagtacactaacacagtacagagacaaattttgtgtatggcaaaatttcataaagaatggcaaggtcttttaacccacatggggaaggctgtccgaggacaatatatgtactttctcccacctcaaaggctaatcatacactagacagakgtcaatcttcaagcagtttaactggtccatttgagaaagataagtgttggattttcatatcataaagttagtagtagtagaaataccttgtttcagctgttcgagtaacttattacccttttctctggcattatcatgtaagagtttataaacataattgctcaatgatttggaattatgtattaatactatcaaggagcaaggwgaacaaaaccagaaytctagtcaaaggttttggaggtggctggctactcagaaacatttatttattcagcacacatttattgagggcattcttcttggcaagcattgctggctagtacaaaggccaattggtacaaaggcgaataacagagccaccatagagccaggtgtggtggcacatgtctatagtcccagctgcttgggaggcagaggcaggaggatcacttgagcccagcagttcagggctatagtgtgctatgattacttgaatagccactgcattccagcctgggcaacatagcaaaaccccatctcaacaaaaaagcagagccgccaccytcaagmgcacctgcagcctagtaagggagacagcagttacactgtagtatgaggaagactaaaccagagagatattcaagattctctgcaagaccagaagagggtcttaaccctgggggagaaacagcaggtcagatcaggaaaggaatcaggaaccatttctaagatggagataacactcagctaactgagagacagaagtgtatagtgtatatagaggcagcgaggaagaaggagagtkcaggcgtttgttcaggaaacttcaaagaactgggatgtctggagcatagatgtgatgggagaaggagatgtaacaggctggagagggaagcaaaagccagattatagaagccacattgggaattttgggtttccttgtgtagacaatggagagccaccaaagcatttaaaacagaagagttttcatggctacatttgcatttttgaaaaatataaaagacctgagtattatggaccacaaggtagtccttagtaattcgatggctgagaggagattgccagatatccacccttgcagaggcaggctgtgggcccttggttctgctccttttggacttccagctgaatgaggtgtccctgcttagcatccctattttaggaagaactagaagaaactggaactgagatttcagatagcactgattaaaggcaataaggagataaaaatttatagggggaattaatgctttttcttttttgtaagtaagcattcacctaaaagagttgtgccttttcccaaagatgctcccacattgctcaagacatttctggaatttctcttttgaaatttctttaatgtccaacctggattcatgtctttttatggttgcattttttaaattttgtactccaaaataagcactactctatctgatttcttatcttccttactagacctagcactgaattgacttttgatgtattcccaaagttaaatccatctttacaggatgaaagttttgttacctctgaagacatagaagaaagtatctggtcaagaagttatcagctacaagtttctcgaccctcagtctcagagactgcctatgaaacaggggtgataataatatttttcctgccccccaccacattcagttattgtaaagatgctaccagacaacatgggaaagctttttgtagagtgctgcatcagcgagtgctatttttgttgtctcacagtttgcaggcaattccaaactctgcgtttaccacatcgtggtgtctgtctgtatgttcttacagattgtttacttcatggaagtagggcctgggtcatatttggctttgttttaccagtgtccagcgttggcagcatgcattaaaagcccccagatgttttttgaatgaataattgagtctagctcattgccttttcctcaaatcacatatatcagaaataaataatgcacttgagattattcagttcaaataatagactcagaggctacttgagtttctttgagtagtttgtcattaggaaccagctgttctccatctctgaaggggcaaggacaaagggctaatgaaatcaatcaatctgaaagcataaaagctcttaagctttatttctgtgccctttactttgactgcatttaaaaataactaggaacattttttttaagttactgatgctgggaccccatcccagaacaattaaatcaatacctttggagttggaagcctggcactgatagtttttaaagctacttggtgattttaacatgcaacctgcatcggatgcaggggctctagaaatatgctttgagaaacattgctttaaacaaataaaaaataaaaaaaggggcccttctctctagttctacatcaggtgctatatgagatggataagaacataaggcatgttcccactgcagtcttttgaggaaataaaaactagcaatcactagtatgagtgagtggaaaagcaactatcagtatttggtgagctgtgagaaatgaaaagagacttatgctgagcctgagactttctgcagaatctggtagatgttttagggagtttatcatcaaaatataagacagtctctacccacaaaaggaagttgactcttagcttagcaagccttctagtaccagccaacaggcctgaccagtacaaagggtctgaaggccttattcccaacacaaatcaccatgtttggcaccgggaatgcaacagtgaacaagactcaaactgtctcaaacaactgagtctgttcacaatcaagtaaacaggcaattacaaaatggggagaattgatgaaagaaatgaaataaggttggtgagataggaagcaccagttgttggaggacttttaagggtagactgaggtatttatttcagtctaatatgataaccagtagtttctgatcaaaagaatgctataaaagaaatgtggaagaaatattattttttaagctttggatctgggaaggaaatagtacagatgtacaacaattaggacacctgcaacaatcgtagggttgggtgataagttcctaagttagggtggcttggatgtgggaagaagaggtttgtagacttcccaatgaaaaagatagctgtttatattatataagtaatttaaattcatttaaatcggaaatgaattgctaatgttggaattctatattagactacttattgtgtgtctgagaatcagttcctctcttgatatttcccattgatacaaatagctattgtatcttagtctatttcacaattgtgggagaactttaaaaactggataagaagttagtgaagtcagtcaaggtctagtcctttttgaaaaatcagttgtttacttctgtttgtaattttacacagccccataccaaaaaaacaccaaaaacaataacaaaaaaaccactttcctgtcaaacacaacctctctgaaaatagtaaacttccatattttaacatactatatatataatatatmctatatacaatatataatagattacatattatatatgatatatataatatataccatagagatcagttatatatagtgtatatactgtatatatactatatatactatataccatatgtataatatatarctatatattatatataaccatagattttatatatacactatatataatattgtaacacactataaagtcaatgttatttgagaatctgagcctatgtgaaattttttattaatcaaacstaaatttttgtctttgccttcaagtgaacaagctctacaattttcatatgtaaatgatcagtgtgtaattaattccaaaaaaattcactactttttttgggccaattccataaagagccgcagagtggatagtattgagttattgggacatacatgattgtaaactatcagaccccctgtactcaaattgagtccgtattctaaatcttattgtgtatcctcataggagactgtaaagtgcgggcatgctttcaattcgtacagtctgtgatttatagaggcaagtaggtcaggaatttattatgctgaaaatcataataactgttttgttttgcttttcacaatgaagtgaccaaagcatgttgaaagataaatggatgaagcattttgattatgcttktatttctattaaaggttaaatattattgccaagtaactagccatgctaagtattatgatattaaagctgaagtagtttgtaagctgatagccctttctttcctctgggtttaggtttgttattaatcaaaatgttggacttgcttwgtgcagtggtgtatgaaacaaacagttgaaaaagacagctcctttaactcacggctctctgctttttttcaaatttgtaaggaaatctgtttcttcttgtggactttatgctgttattcatgtgtctagagttcattttttataccagagccgactaaatccaatagttgcaagattctctcatggcatagaaaggaaaaaggtgcctttttatattcttaattgacaaattctgatcaagtcatttttgaaacatggagaatccctactagaaatggatattacagaaaaccatctgtatttctgggcagagaaaaggataattttttaaatagaagaatatgtatatgaagaggtattaataagacagtaartttgttttctcatatcaatccaggagtattgatgaaagtgttttaaagggcgtatgattccagctacactggtgttggcttagacatcaacacagccagcccgtaagcacttggaacgctgctgctaagcatgtactgaagtgcagtagaggggtctagatgcccccgatgtgtggtaaagtacctttaacaggacagtcctaccattcttctgcacttacttctcatcagtggtaatattacaattttaaagggtgcattttgtgggggatgcagcaaagattgtaagaagtgttgaagaaaaaggctacctctcaatgactggagaraaaaaggcttaatttattacttaagtaaagaggagctgtgcttttaggcacagtgtctccaagcaaagcaggctgcaaatcttacatagtgttttggggtcaggaattgtttaggggcagctatcaccctcagaagccccattattygaaagaaactattgttgactggctggctttcagaagcatattcactggagcsagtctgcagccgacaggccaactttcaaaagcatgtggctatcactggttaattggctttcagaggtgtatttactgaagtgagttgtcactgattatttagaccttggtgagatatcattaactgcataaatctggtttaattattcttccaactggttctagtggtttacttaataccatggctgtcgaacagtcagcctttttctgggagttagagattgtcttactttcagaagctaatacctaaacgctgtaggaaattgaacgcacaagaaaattagattttgcaactattgtacaatacattttctaawtaagggtgtctactaaaggaatggaagtgtaaaaagtcagcaactccacatgtgaaatagcatattcaggtattaagatcagttatgaaatttgatacaaattatgtatcattaataatatagttctaagcatggtggcatgcgcttgtaatctcagctccttgggaggctgaggcaaggtgttcacttgakcccaggagttcgagaccatctggggcaacatagcaagatctcatctcaaaaataataataataataataatgaagtataaaaatgtgaatgtgacttattcagtaaattaaagtagattctagatcatccatatatatcatttctacttattgctttccagtaagctttctcaggtgggacaaaagaaggtagaaayggtacataagtctcaactcgccagccctggtgagcagcagctactgaacccttagtaatgatggtatcactaaaattgtgacattttatttccctcctaaaatctttttaggattcttcaaaatctaggtatacccatgtgagtttgccacacaagtaaatttcactcatcatttgtgctgctgtagagagaaaagagtgagggatcttcactactgcctacctactacccagatctctgcttatatgggggaaaagatattagcatcatatttgggtttcatctgaaagttacaacaggcatataagaagtattaatcctacagtttaaccctatctgctgtgatgaagaaaagtgtgtataggatataactggtaggaaaagacttaagagttttatttgtatgaaaattgaacttttcgccgggcacggtggctcacacctgtaatcccagcactttgggaggccgaggcgggcagatcacgaggtcagaagtttgagaccagcctggccagcatggtgaaaccccgtctctgctaaaaatacaaaaaattagccaggcgtggtggcaaatctctgtagtcccagctacttgggaggccgaggcaggagaatcgcttgaaccygggaggtgaaggttgcagtgagccgagatcgygccactgcattccagcctgggcaacagagtgagactccatctcaaaaaaaaaaattgaacttttctctttctaaattcattcaactgttctgaagtctgctctttggacttccctgtttattcctggcacctcatatggggcacagctaattaccaacatatttcgctgatcctaaagatagctagcttatgacttctcaggattccagcatatgctgataccttaagaccagtaagcttttgatgaagtaagaaagcaggattcgttagattcgttgtaatcaacagtagaaggaaattagtccatagagttatgtcaaaagtttagtttccttttgtatgaagaaaatattttttaaaccagcaaattccccaggaaagagagtcataacaccatttgaacatcatttttaaattaccttaatgtattcccaactcttgacccatgtaactgttgaaatttttaaaaatcagatagggctggcttattgtcttgagttttgctctgcaacctgactcactctggctaaaggaatgtgttctttaaaggaagcagacagtgtcctctgagtttactttgaggaacacttctgtatagaactcttttaacctcccaacaggggagaaacctcaagtgaagactgaggcaaagagactctctactagaaatacaaaccagcagaacaaactccagacatgtttttcaaatttaagggttttctgagaagttggtttccatgtggtgtaagcaycagtaaacaacaaacccatcttngtgttctntatgcttatgtttcattatgtcgatgatagtagagtatagaatttctactgtaagttcccatgcaagaaatcactgaaccatctctctccctatttaggatgtcacatgtacttcagtttgaggataaaagcagaaaagtgaaagatgcaagcatgcaagactcagatacatttgaaatctatgatcctcggaatccagtgaataaaagaaggagggaagaaagcaaaaagctgatgagagagaaaaaagaaagaagataaaatgagaataatgataaccagaacttgctggaaatgtgcctacaatggccttgtaacagccattgttcccaacagcatcacttaggggtgtgaaaagaagtatttttgaacctgttgtctggttttgaaaaacaattatcttgttttgcaaattgtggaatgatgtaagcaaatgcttttggttactggtacatgtgttttttcctagctgaccttttatattgctaaatctgaaataaaataactttccttccacattacatgttaaccattgcagactgcaagcctgtttgtgtccttttaccctaaaatatatgaaggcttccttttcaagatttttttataagaagttcctacagaaagaatatttgtgggaaacctccctttcactaacttcagaatataataaaatattataaataaaatatagaatataaatatggatggggttttttgcatataaatatttcaaaatatccaagccagcacaactcaatatcctcatgccttcagtcttgaggaacccccaagtgaacattcacacctccatgcaggccagtgcctgggttttatgggcacagtcaagatactttaacactctaagtaacatcagccaggctcactgcatgcccagcctgacatctggccccctgcccactcctctgcccttctcagcacagcgataccaagagcagatgcagaggtctcattctgacgataaaaactcattaagaatttagcttttgatgacaatcattcatacttgttttttgttttttgtttttttttttttttgagacagagtttcgcttttgttgcccaggctggagtgcaatggcacaatctcagcttaccacaacctccgcctcctgggttcaagcaattcttctgcctcagcctcccaagtagctgggattacaggcatgtgccaccatgcccggctaattttgtatttttagtaaaggcggggtttctccatgttggccaggctggtctcaaactcccagcctcaggtgatccacctgcctctgcctcccaaagtgctgggattacaggcatgagccattgcgactggcccatactggttatttactgtatattatctatattatatattacagtctgaatgctaaaattatatcacgggctaattccactaacctgataaaatctcaccagctacttcttttcagatcatgtctcatcagctctctctttcagaatgtaatctgataggctttctctagagcatagagcactggttctcaaaatgtaatcccagatgcaacactacagcagcagcatcacttcagaacatgtcagaaatgtaacttctcggccatgccacccaccactaccacctctctttcagactactgaatctgaaactttgaaccctgagggctcgttaaacagatggatgggcctcactcctggtggttccacctcttttgatattggcaatatctagtgaagttaaaaatgtgtatatccaataacccaaaaattctaattctaggtcctaggaatcctaaagaaattctcacatattgctcaaggaaaggagtactaagttataaactaaagcatcaatcaaagaatggataaataagttgttgaatagtcatactatggaatactttatagaggtgaaaatcagtaaaccagagctatatgtagtagcagatctttaaaataatgtggaaaaaaaggaaaccgcctatataaaaattaagacacaattcattatgatatattgtttatgaatgtacacatatgtagaaaagtataaaaacacatgtggaaatagtgtttgcctctgagaaggaattcacagggagctcacttgtgtttgtaatgttttattttttaagtgctggatggtagatactcagttctcattttctgtacattttggaatatctgaaatatttcacaatttttttatgattatatctggaacctgaggtgagaagacagaagaacccccagtactaacaagaaccctttctatttgcttcaggaagaaggagagagcttcaaagaggaggagagggctatgattgaggtgttctgagaaaatgtcaacccactcaaatgcagagtggtcagactcaaagccaccccaaaataagccagtgcttggaagtgtgtcccatcttcccctcaccataaaggttataatattggttttatttcagataaaacagaatttcatcttccaaactcacaaagtctctgttggttattctgaaacatattaccactaaatctgtctgtgttgaagtaccctgtggtttctctaccattcctcctggattgtgtccaccttaaccagtgcagtgttatcctggaacagaggaaaccacagacctccagggcacacattagagaatactatttgcaggtttaaaaagataactgaatgacaaaattaaaaccagtttggttgaatgtttctcatcctgttttaaccacaaggagcagaaagatctgaaattctacagagattagaattttatcagaagaacttcaacatgataataaaattcaccataaacttaactgaataagagcaataataatttttaaaaagcttaaaaatgtagttgaattacctgttcaatattgtatgaaatgtgttcacagtaaaccttttgcaaatgtcacaggaatgtgtggaagccaaatgaattcccaaaacaaaaaaaaaaattcaaaaaacatgttagaaaattagtcttttaattttaatttcatatttgggatttttattttatgtgtcttaccctagggatgttatcctaagacaaggaagtatgttagcattggttttttgtttgtttgttttgttttttacatttcttccttgctatatgagttagcattcttattcattgtctgtgacaatgctgcacgttctggagagcaaagagaaaagcaactcccagcaaatttttttctcattttatgacaaatcagtttttctcatggtcgaagtcattggcaaggtgaaagtttaaccctagacctctccattctcagtaggtaattgaggcaaatgcagatctctctagaatttttaatgatataatacaaaatgcaaggcttgatgaaatttgaattccaagggaaataatgaaacaccaaatcttactattagaagtcctgggtttgtagaaagaaacatttattcatttattccccaaaatcactaccaccaccatcaaagccataggtgaatactaaatggtgtaacaatacacatgccctcagcactctgtatcctctgaggccacacagtaatgcatctgctgcatctaaaaatggggctaccacagaacaaggtcattaaaaagtgtgaggagatgagtggtttgctgctgtttttagcacaagttcaatcagctatgatgtccttatcaagctgtcactaccaagttccttgataagatctgacgtgtgaggtacataaacctgttctgttgtagcactgtggcctgtatggaaaaggttagatacatgcaaaataatgcccaaacatgctgtttaatcttggtgataacaagaaagaaaatggaggtgtgaagtgagttaccattgagggttgtatcagtataagcaatttgtctgtaatgggtgtagagaagttaagagaggttacattctttaacactgtcattctcacacacacacacacaaaagcaggtctaggttctctatggctttgtctctgttccaataactctgaacagtttatcaggtggtatcatttctgcttactagaaagcaggaagtttaactgtcccaagtatattttatctcctttcttcttttagcttttactgaagacaagtgaaacaggaaccatactgtagagaaatcctttctaataaagccttgatgaaatttgaattctgagagaaataatgaaacaccaaatcttactaggatgggctttagaagtcctgtgtttgtagaaataaacatttactcattccctaaaatcactaccaccactaccaaagccgtaggggatgatctttgtcacaggtgctaagagtttcattattccctgtggaaatccctgtgaaagttgttttcattggtaggctggtaaaccagctttccttaataaaagaaagaagagccctcatttgcagcatttactgatttccacaacataagtcctctcaccgtggctgatttcaagccaccaaaagtagctccagtaaactggttatttttcccattctgttttattctagctaaaagcttatacagtgactcttgcattggccctaaagaacttacacaaaggtttgaaccctttgccaggatcacagtcttcatgcatatttctattttatgtaattacttcacaccgtcctctaagttctagcaatacctgtaccccacatttttatggcagtttatatctttagattctctcttgatggagttttccaaaaccacttgcctcacatttatttttcccctgcttcttgtgttttttgccccaattagtcatatgtccaattcaagatgcaaccaaatcttacaggggggaaaaacagcgttgggtggggaaaggaaagaaatgtaattatagttctttgaattattccaggtaagtaataatgtataaattcattatttaatttattttaaactgtattttgggttgggggtgagaaatcctacctgaaaaggaaagatgactggcttctaaatgaaatgcagacaggagtctggtccctctcttttccacatctgctgggaattatttccttaagattagatcatggtgctaattcatgttaaacatcttctggaggctttcttcacagcaccagtcagaaagaagctgttcttggtcttttaggaaattattattttctcattctcatgatgccaaaaatgatagtcattgctaaagttatggcactttttaaaagtaatcaggataattttaaaagcaggacactcaagtgactttcctatttattttctgaatttactctagagatttattatgatattcaaacactttaataagaatatatttgaggccagaagcggtggctcatgcctgtaatcccaacactttgggagactgaggcagaaggatcacctgaggtcaggagttcgagaccagcctggccaacatggtgaaaccctctctctactaaaaatacaaaaatgagccaggtgcagtggctcacatctgtaatcccagcactttgggaggccaagatgggtggatcacctgaggtcaggagttcgagaacagcctggccaacatggagagaccccatctctactaaaaatataaaattagccgggcgtggtggcacatgcctgtaatctcaactattcgggaggctgaggcaggagaatggcttgaacccaggaggcagaggttgtggtgagctgagatcatgccattgcactccagcctgggcaacaagaacgaaactcttgtctcaaaaaagaaaaaaaaaaaaaaaggagccgggcctggtggcacgcacctgtagtcctaggtactcaggaggctgaggcaggagaatcccttgaacatgggaggcggaggttgccgcgagccaagatcatgccactgcactccagcctgggcaacagagcgagaatctgtttcaaaaaaaataaaaataaataaattaattatttaattaattaaaaaggccaggcacagtggctcatgcctgtaatcccagcactttgggaggccgaggcgggcggatcacgaggtcaggagatccagaccatcctggctaacgcagtgaagccccatctctactaaaaatacaaaaaattagccgggcatggtggcaggcacctgtagtcccagttactcgggagactgaggcaggagaatggtgtgaacccgggaggtggagcttgcagtgagccgagatcgcgccactgcactccagcctgggcgacagagcaagactccgtctcaaaaaaaaaaaaaaaaagaatatatttgaaatgaagcataccatgtatggaaaataaatgactaaagtatatgttgtatggttcattctcaacagctgtgagtaaacttacaattagaaggtttccttctttttgtgtggtgtgtattattttttaatttgcaattttaaggaaatattttatttagaataagaggaatatgaccattttatttctattacaaaactttgtaacaatactatattattggcgtaagtgaatagactaattaagaatgggatactatttcccaaggaacaaaagaattcaacaagtgatttttaaattaatctggaaaagttatacatgatattatgtgaggactagatccatttcagagtgaaattccataatgtccatcaaacctaccatgtccaaaatgtaactgtcatctacacttcccagccctgcctccac

SEQ ID NO: 93959 - DNA, 12822 bp, Homo sapiens
ttctgcatacaggttggcacagggctgaaaatagaagagacaggttttacaaagcaagagcaagaacaggggagggtggatagctaagggacttttcaaattcaaattcctgcaccttctctgactccaggcctactgaactggaccctcctcaggaggaacccgagaatacggtgaactaaaagctgtcttggtaatctgtggggaaccctgggtcaatcagtttatagcctccgggttcacatgaatgacatcctaatgtattaagagtagggagaagagagactgttgagcccttgtgagtgtgtatttaaggaactgtggggtggggaaagggtcagagattctgaaaccagggaaatatcatgctgattttcaataaaaggcaaaataaaaaagtgagatttccatcgagtttatgttgccattgtgtagtggtaggagtctgcactctgtagtcagacggcctggctttgaattctggagtcactagcaagcggctatgagacgttgcacaaattttttttaacatctctaagctccagtttccccatctgaaagtggggatgacaacagtactcacctctttgtgctagtgacagaaataaatgagataatcatcatgtaaagcactgaaatcgtgcctggaacatggtcaagcctagttatgacagtatttttattattgtggcagttgaacaagttattaaaagtggactactaaagggatgcttcatagggacttagaagaggaagcaaaaaactaccagcaagagtggcagtcaccataattaatagcggttgtggctgactccttccattcagaatggacactggccatagcacagcatgggtttatgggcaacaaggcagcctgccatcattgccttactgccaagaagacttcgatcagggagatcagggtgacatgttgtctctggatttagcaagtcattgacaagcacttttaggatatcccatagacatggagacacatgtgctggatatagggatacaggaatgatttgagcaggttgtgattaactagctgaatgccaacctggcaggagtgctctcgcagcctgttatggctcttttctatcactggtcctttcaaaatgttgactgatagttcaggatgggtgctttgcaaatttatttttggcaccaatatttttctttcttcctatgcgtggttaatagaaagcccaggatacaaaacagatgaaagatctgttctgactaaatgatttgatgacattgaggagggttcccctcatttcctgaagcagctatgaacatttagggctctgtgtcttgaaaactttggagctagatggaaccatgaaggcagatcccaacgccggcaggcagtgactcgttgagccttgagcactgaactccaaatcccaggaggaaatgaggtccattacttgataacttggctttgaaaatcagcaaatatagttatgactttgagcaagtttaatgagtcttgccaagtgtcaaattcttcaactataaaatgaggagagtaattgtacctacttcatagagtatttgtgcaaatcaaaatggaataatgaatatagagctttcgacatattattattattatcatcaataaggggcaaaaaagtgagatttccatggagtttatgttgccactgtgtagtggtaagacaactacacaattatctttacttgatagaaccaaaacgtttctatcctttaattgcctttacttgatcgaaccaaattcagcaagatggcatgtaacagggtaaagaaaaaaatttatatttgaatcttacaaagatatgcagaaatatagatatggaatttgttagcagtctatggagaaaaaaatgtaggcagtttaggtaacagtgaaactcaatgtaaaagtcaaccatatgtagtcagcaacaacaacaaaacagggctaaatgcaatcttaacctgcataacttagaacatttccatttttcctgctcctggtcagttcacatccctcatctcaggactcacactacagggaactgagagattggaccattcagaggaggctggtgaaggcccggacagaaaccattacgttagaagaacagttgcaggcattatgccatttaccctgaagaagagaggtctcagaggagggtaatacaacagaggttttcagatatgtgggtaggcttcaggggttttatgatgtctcaaagggatattataatgcctcatggagtgaaactaggaggtggaagcttcagagaggtagatttaagctctatataacaaagaactctccaggaataaagttatttgtccagcattacaatgattgccttgggaggtaataaattccctgtcactggatgtgtgtataatttggcagcatatgttatggaaggaactcacaggtggttaagtctggacaaattttagaagctttttcacccttgaaaaatctgttttactaataaattatgaaatgctgagtaatggctttattttatgggtggagacagggatagaatttctttatagaaaacgtctgttaatgtgaatcttggatctgtagccatgctggagatgggcttgctccactgctgagggacatacgtgcatcccagctcttttaattatctatggcacaaatttgaaaataaagtaatgaaaggagaggaaggaaggaaagaagagagggaaaaaagaaagcatctattaacatatattcatttgatctgaataaacatttctccaaaaaacatatttaaatagycaattagctgcagagaatagggaatgcttatacactgttggtgggaatgtaaattagttttgccactatagaaagcagtctgaagattctcaaagaatgtagaacaacattcgacccagcaatctcattactgggtatatatccaaaagaacatcatccttctaggctgggcttggtggcttatgcctgtaatcccagcactttgggaggctgaggcgggtggatcacaaggtcaggagatcaagaccatcctggccaacatggtgaaacccccgtttctactaaaaatacaaaaaaaaattagatgggtgtggtggcgtgcgtctgctacttgggaggctgaggcaggagaatagcttgaacctggaaggcagagattgcagggagctgagatcacaccactgcactctagcctagtgacagagtgagactgcatctcaaaaaaaaaaaaaaaagtcatccttctaccaaaaagacatatgcactcacatgttcatcacagcaccattcacaatagcaaagacatggaatcaatctaggtgcccatcaatggtggactgaataaagaaaatatggtatatatacaccatggaatacaatgcagccacaaaaaaagaattaaatcatgtccttagcagcaacatggatgcagctggaggtcattatcctaagtgaattaatgtaggaacagaaaaccaaataccacatattcttacttataagtgggagctaaatcttggggacacatggacataaagatgggaatgatagacacttgggatgactagaggacggagagaaggagagggataagggttgaaaaagtaactactgggtactatgttcactacctgggtgacctgggtcaattgtaccccaaaactcagcattacacaatatactcatgtaacaatcctgcacatgtgctcgttgagtctaataagttgtgttgggtggtggctcatgcctgtaatcccagcactttgggaggcagaggtgggaggactgtttgagcccaggagttagagaccagcctgggtaacatagtgagacctcctctctgcaaggaaaaaaataagattagctggatgcggtggtgagcacctgtggtcctagttattgaggatcacttgagcccaggagttccaggctgcagtgagccgtgatcgtgcctctgcactccagccctgggtgacagagcagcatcctgtctcaaaaccaaaaaacaaacaaacaaaaaaacccaattgaaattataaaatatgttcaacatcattagtcatcagggaaaatggaaatcaaaaccacaagagagtatttcacacccagcaggatggctacaacacactgataatcacaagcgttgaggaagatgtggagaaactggagcccctatacattgctggtgggaatgtaaaatggtgcagtagctttggaaaggagcttcgcagttcctcaaaaggtaccatagcactcagcaattccattcccagttatatacccaagagaaatgaagatatttgtccacacaaaaacatgtatgcaaatgtttgtggcagcattattcatcatagccaaaaatggaaacaactgttcatcaactgatgaatagataaagtgtggtatagtcatacagtgcaagattacttggcaacaaaaagtaagaggtattgatacacgctacagcatagatgaaccattaaaatattatgctaagtgaaagaagccagtcacaaaaaactacatattgtatgagtttatggaaataaaatgtaaagaataagctaatcttcagagacagaaagtagactggtggttgccaggagctggggtgaaaggagaagtgggaagtgactgctaatgggtatggggtttcttttccgggtaataaaaataktctaaaattgatcatggtgatagtagtacagctctgtgaatatactaaaagccattgaattatacactttaaattggtgaactgtacggtatgtgaattaaatctcaatacagctaaaataaataatgaatctctacttatcttcatttgtaaatttcaccaaactactaacttttaattgtagaagtttaaacacaaagaatgtagagatatttacagcatgtataacagagaatgggaaatatactttaataaggaactcttccaaatcaaataaacaaatataaagaaataagaaaaagatgtacagcacggtaaaaaactaggcaaaggacacaatatgcaagagaagtacagatgaacagaaaattcagaaaagcatgggatggtgaaaaggggagacattgattaaagggtacaaatattcagttatcagacctaatgttcagcattgtgactacagttaataataatgtattgttagccaggcccagtggtgcacacctgtagtcccagctactcgggagtctgaggcaggaggattgcttcaacccaggagtttaagcccagcctgggcaatatagtgagactccatctataaaataatggtaataataatgcatagtatacttgaaatttgataagagagtaaatctcaattgttctcagcatacaaaaaaagtaactatgtgaggtgatagatatgtaaattaacttgattgtactaatcatttcacaatgtgtccgtatattgaaacatcactttgtacaccctaaatatataaatatatataatttttatttatcaatcatacctcagtaaagctgggaaaaaacaaacttctagagattggttggttgtataacaacgtgaatatactttagcactattgaactatatacacttaatgatgatcaacatgctaaattttatgtgtattttgccagagttaaaaatttttgaaaagagaaaagtgtcaaatttattaacacctaaagaaatgctagcggaaaggttaactggttcagcctttttggatgtcatattagtaacatgttaagataatttttaaaattcatccttttggtggaataattttatatctagaaaataacaaggaaaaagaatatgtgcaaacatactcactatggcattatttataatgacaaaaattgccgacagccaaatgtatgacaataaggaaatagttacatatattagaacgtatatatgccttgaaatattgtgcaaccacttaaattgtgtttttaaaaatgactaaattattctagaaaatatgatattaagaaacgagaaaaggctttgcagacgccgccgccgaggaaaaccgtgtrctattagccatggtcaaccccaccatgttcttcgacattgccgtcgacggtgagcccttgggccgcrtctcctttgaggtaaggggcctggaaaccaagaastgactgctcatctaatccataaagctatgttaacagattggagctgtttgcagacaaggtcccaaagacagcagaaaattttcgtgctctgagcactggagagaaaggatttggttataagggttcctgctttcacagaattattccagggtttatgtgtcagggtggtgacttcacacgccataatggcactggtggcaagtcaccactgggagaaatttgaagatgagaacttcatcctaaagcatacaggtcctgaaatcttgtccatggcaaatgctggacccaacacaaatggwtcccagtttttcatctgcactgccaagactgagtggttggatggcaagcatgtggtstttggcaaagtgaaagaaggcatgaatattgtggaggccatggagcgctttgggtccaggaatggcaagaccagcaagaagatcaccattgctgactgtggacaartcgaataagtttgacttgtgttttatcttaaccaccagatcattccttctgtagctcaggagagcacccctccaccccatttgcttgcagtatcccagtatctttgtgctcttgctgcagttccctttgggttccatgttttccttgttccctcccatgcctagctggattgcagagttaagtttatgattatgaaataaaaactaaataacaacaacaacaaaaagaaacgagaaaaaactcactgcatatatatagaatgacaccaattttgtggcaaataagccatacatatagaaaaaaataccaaaaatcatggtagggttaccaatgttttcaattttttttttgcttgaaacttctctgaatgtcctaaaaggtcgacaggactatgtgtccccccttccctttttttggtatgccttttaaatcataataaaggtacatgtttaatttaaaacagagaaattcagaacacaagccactttcaacttcatctaagagcctattctatcagatacataacaggaaacggagaccaaatatttatctccaatattgaaataaagcatagtagttccatattttattgttcaaatataagaaaactcaggagaatcatgtaataaacattttctagttttgctaataatctcgatggaaggaaaagagccaggtcccgtcactggcccatcagtgatgggagggtagctatggtcctgttgaaaggctgccctgatgttttgttggtttctgtaaacatctggctcttgaaatcctaattattcaggatgtaaaagttttgagaattatagtcatcagaatttccaaaaaagttgtaatgtttattgaagggcagaggaagcttccctccctacctccatgtattcatctaaagctgtgatatcagcaaaggattttgggtggccagcctgaatgtcagtcaaaactccacggatatagggataacacaagggcagtcagggccaggtgtttatattgaaatgagccaaggaaggaaaagcagcattcagtctgttaagctgtgtgaattgaagctttcctgcaactgccagagtgggatttcgatctctcattagaataagtaagaataagtaagaaaaccttttaaagtgagaactgctttaaaaactactgtattgctcaaatatgaatctagtgtgagtgagtctttttcattctacgggctttgtttttcaggccagcttattggagttgcagaaatatttttgttaagctgaaggtcgccactggcacggttttaggcatatcccttcacttcactgagcctgaatgtccccgtttccaatgtgagagtgctttcaagttttaaaattatagaattcactgaaacaagcatgtttattcactcctctctgtgccgccatactgctcgcatgagtatataaatatatatcactttaagtaactactttaggatcagggtcttatttataccaaaggtctttgcatgtaaaagccagttggctcaaccaaatggccaagaaaagatgtccccttctctccctaacctccatgtatcttctcataccagatggtacaatctctgaaattccatcttcagagggttattatttagggttaagtttgatcctttttttggtcactaatgcttcatggtgaatggaggttgggaatattgctctgcgataagactgcctaggtttgaatcctaaattctacttagttgtgaggccttcggcaggatatttaatcaatctatcctttagtgtcctcattcataaaatgggaataatttttgttccactgtcatagggctgttataagatttaaatagatgaaacatgtaaattctcagtaaacattcattcctacttcatctggtgggagaatttcaaagccaagtgaacacctcaggccaagatgtgaaaaggtcccagaatggaaatcgtgacagaatgctagtgatataaacctcacctactgcatatattagcttaggcctggggtgcacactactgagactcacatatttttggagaaaggtttaacattattttctctatttcatgaactacttccttctcatccccaacttccttttataattggcctctcaacattttctatcactccttatgagataatgagaaacaatgggcttaactttcctctctcagctgtcgtgcatcctatctataggttgcaaagatcccctctctgctccactcccactggtctattcctgggaaaaccgaaaaccaaagaaggaacatgcaatagttgcttgaaatgatagggaaattcttttttttttttttttttttttgctgtttccttagccctgacatgacattccttttctgtttttaaaagacacaacactgcacattaactgtcctgtgggagagaccacaccctcttccaagtcatcccagtccacatcagaaatgtgtcttctgcaaacctgacacaaaaagcttcccattttgaaaaggtcctgatagaattaatatgaattgaatcgcattctttttactgtaaccaactatctggtgttaaaaaagacttttgcagaattctgggcaagaattattaatgcatgttaatgggaagcctccagttctgctttgctggggaaggaaaggccagctctcacaacttcctccacaccatgttgggacccagagccaaataaatggtccatctgtcttccatatgatgagtttcaatttggaaaattcaaggctagtttgagttattggaagcaagttggtggtatagcatgacaattaaaagcacaggttttaaaactgacaaatccgggttcaaatctccatttaactacttactgcctttgtaagtaaccagtctcttagctctgcaagatacaaatagagatacatccttcatatacattaaatgaagttatgtaagtaaagcatcaagcatatagtaggaacttaataaattatactgctgtaggttggctagtgaccatgtttttgaccactaaatataacaccgtaggaaaggaagcaagtggaaaagggacagcccatacttacagaagcccaggttaaagccctctgctaggatgcattaaagaatctcatcttagataggctcctcagccttgaatatttaatgcaatccaagttttctctgccattccataaactcagcactgttgcttctagagccattgagaagctgctaagaatctcaataaacaccatgaatgactttaaattactctcctttcagctttgtccagattcagaaattacaaagcaataatgtgcttcccgatttatctactgaagtgatatgagttgcgcctgttatagtgggaaagcttccttggacatctatattttcccatatcaccaagagggagtgaaatcaagacacctggtcatctaaaatgtgacctaacatactcttttacagatacatgcatttttatataaatggatttttagaatagtactgtgtattccctgatgtgaagataagttcatgagtaagcctgtggtttccatctctctccttgctcttgtcagagccgtaggtgcaactatggtttgtgaattaggaaggcagttggcccctcacacctatatggtaaagtgtgaatgaggagtcatgtgtacacagagctctgtaactctccaggtgcacagaagcacctgccacatccccaggtgcaagtgggtataaaggcaagtgtgttgtggagtcacagggggcttttgggcattggtgctttgctccactcccatctccctgccgccaaatcatcagaggcttcctctggcctgatacagctgggctctgggaaggtaagtgagcttatccaggatgggagcagagaaggtgagtgaagctggacagaaacagaggaatggagattggggcacacatgctttctctggctctctgaatgaacacattcattcattgtcccagtcttctatctcaaattcctctgctttacttctctgtgggataactttctccacctctgtaggagatgcaaaaacaagggtgggtctcaaatagttgaaattcttttctatgttgccactgcttttgctctccttcatttgaacaaaagggtgtagagtttggatgaaaaccaacagggttataaagaattttatctttggataaggctttcaagggctgctttctatgtcctgtgagcctagagttgcctcgtgggtaagtagaaagcacttatcaacccaaacaaatattttcccaggttcccttccccatagagccatagtggatactaaaatgaaaacagtcagcattaattcttgcttaccctgcgcactttttcttctgtaaagcaggaggaattctgaaagtaggggaggaaagagataagtttgaatgacaaagactgaagcctaatggagggaaaggctttctctctccacctctagggaacatttccttgcctttggcatctgctgcccacctcctgacccccacagcccccactgccctgcatctgattatgctagccagctaggcctttcctgagcttgctctggttccggaactgggagtataaatctgtactcagtgggcccagggtctcctggccagcccttcaactgattaagccttgagtcacccgcactctggtatgtttcgccttagtgggtaacactatagactctggagctatatcatccagggtcgaattcctacctctgccacttgctaattgtggaagcctgagcaagtcacataacctctctgttccacagtgttgtcatctatgaaataaagagtatagtaacagctacctcacagccttgctgaagggattcaatgaggtgctacttgaaagagatttagaagggtttctgacaaaaaattcaataaatgctaattatgtttatttacgcctaacatggcatagagaggaagggggctcaccttgtcccttggcactgcaaaagcagagtttggcagacctttcacagaccctgagctgggcctcccctcaactttttgccttatgaggaatggactgatgaaaaatgaccctaatccaaggtacttgtctcagtagcaaccttttaaagattaataatgttttaagaatctctaacttctaagagatctcttttttaagtaataaaagaaaacatgtttgtggtaaaaatccatatattttgtccataaagtatagaaaatgaaaaccaaaagcatttctcaaaattccattttccaaaggctgttaacaatcattggctttgtataaagcaaaataaaggaataatagttttgtttggttgttctacttccaggatccacattcttttagttctgctgtctattcaaacaaaatgaattattcagtagtttgtgtgactgaatgtgaatgaaattaatttagtgcagatttcttttttagtttctaggtgactcagcttgccttgtaactattgccctagtaagattcattctctgctgatgtttcattttgctaattacatatttctgaggacaagtgagcttatcacttattcaggcaccaaatatttattaagccaagaacatttttttccttatatttgagcccaatgacttgcttactttgtggcttcctaagaatcaaataaaagtagttggcttatgtgcctatgcttctctacatataaaatgggtacaatatattcgtttgtcagatagtcataataaggtcctaataaatgtgaaatacctccactaaaaacgatctaatattaagaaaagaaaaatagctcagagcaggctgcattatgtaaggtatgcaaaatttacctggcccagagagacaggagtatgggatttcagttacactgggaacccctttctttgcctggggagcacttgtttaaagacatgttgttatttcttttcttccctgcctcactcattgtcttcatgtttctggaatttgtgatactaagaccaatgtacagccaatcagtagcttaggttattttaatgtgaattcttggtaaacaatttaggaactacctcttcttttttcctttaaaaacctgcttgtaactgctgctaattggaggatctactcaggggactagaatctatgctcctgggttgttgcagtccgcaaacttggcccaaataaactctctacttatgttaattttgcctcaggttttttcctttaggttgaacacgtaca

SEQ ID NO: 93960 - DNA, 13290 bp, Homo sapiens
aaataaaaataaaaaatgtcttatcttctgtataatgtagacagggcttctgtctcctgttgcaacagtgttttaggtgcccttccaaagtgatgaggccagggactatggctcacacctgtaatcccagcactttggaaggccgagggaggcagatcacttgaggccaggagttcaagaccagcctggccaacatagcaaaactccatctctattaaaaatacaaaaaattagctgggcatggtggctcatacctgtaatcccagctactcgggaggctgaggcatgagaatcgcttgaacccaggagatgaaggtttcagtgagttgagattgtgccattgcactccagcctgggcaacagagggagactttgtctcaaaaaataaataaataaataaataaattccaaagtggtatgagaagccaaaataatgatggcacgcatctttgcaaagcatgttttactcaaagattttgggaccctgcgcagtggctcatgcctataatcccagcactttgggaagccaaggcaggcagaacctttgagcccaggagttcgagaccagcctgggcaacatggcgaaaccccatctctacaaaaaaatataaaaattagccaggcgtgatggtgcacgcctgtggtcccagctactttggaggctgagaatcactaatcaaaagtgggtggggggctgtgtttatatgtacagggcaataagaaatattttctcaagtcattaagatgcttaaatataagatgaggatatttcttttaaattacatttcctactaaatttttttttcattaggatatgtgtagattttgctgtgacttatgaggtccatcaaacaagagttgcatcttttcactaaacttcaacttagattgtaggattgtttttattaagatttcaattaaaactttgtcatgaaatagaaactgcggtatatttaactcctaattatattctagttatccatgtatacttgagacattccaagaaaatacttaaaccatcattgagagacagggtagtgttgcttagctttcagttccttgaatgattattatttccttctctttgtctgatgtgcagcctatgtgagaacagtagccacaagaaaaagaagtttgtgctttctttctcacatttgtgctcagccactaaaaggagcatctcaatcttaaaccatggccgggcgtggtggctcatgcctgtaatctcagcgctttgggaggccaaggtgggcggatcacctgagatcaggagttcgagagcagcctggccaacatggtgaaacctccgtctctactaaaaatacaaaaattggctgggcgtggtggcacacacctgtagccccagctactcgggaggttaaggcaagagaatcacttgaacccaggaggcagaggttgcagaaagccaagattgcgccactgcactccagcctggatgacagagcaagactctgtctcaaaaaaaaaaaaaatattgaatcacttaatgatgtccctattcctaggaaaagagatgagccagcaagaccataatgaaggagaaagaggaaacattctgctgagttccactgagagcacgaaccactctaggcctgagtaaggaactgagaggacaggagcaaaaatgcaagtaggaaaagctaggtagtagacagtgccgcagcacttggagttggaattccagtcaaaacaaacagcattttttgctgtcctaagaatttcgtggaaaatcaggcctacccaaaatccaatgagagtgtttaaaattgtaatctagagttaaataaatgatccttggatttattgaatttttgcatttctgcataaccgtttcagtttgcctgccagtttgcgtaagtgaaagctgcttcttggaaatgaccagacaagatcctcttcatacctgaggaatgaatccacttgagcctcattgctaccccctgaaataatgcatttttataatcactcatttttgtaagacttaacactttgttatgctgatgcccttgcttaaaggtttttccacttctttcaggaaatggccagcctcaaacgacaattcacggaactgttatcggatatagggtttgcaagggaagggctcagagcaagggaaattgagaaaagggcccaaggaggagatggtgtcttagatgccacaggagaagaggtaaagaatgtggagttggttcttatttctctttaattagcacctaaatacaatcttaacctgggaacacttgtagacattcttcttcacttaagcctttgagcagtgggttaatggcattcttgattttctgcttcgcacaaataaatatcagctgatctggcacagtggctcgtgcctataatcccaacactttgggaggctgaggcaggtggattgcttgagctcaggagttcgagaccagccagagcaacatggtgaaatccctcatctctctacaaaaaaattagccaggcatggtggtgtaccacctgtcttcccagctatgtgggagggtgaggtgggagaatgatgtgatcccaggaagcagaggttgcagtgggctaagattgagacactgcactctagcctgggcaacagagccaaaccctgtctcaaaaaaaaaaaaagtataaaaaaatttttttaagtgtcagctaacactcataagaatagagggggctgggcacggtggctcatgcctgtaatcccagcactttgggaggccaaggtgggcagatcactcaaggtcaggagctcgagaccagcctgcccaacatggagaaaccctgtctttactaaaaatacacaattatccaggcatggtagcacatgcctgtaatcccagctactcgggaggctgaggcaggagaatcgcttgaacccgggaggtggaagttgcggtgagccgagatcgcgccattgcactccagcctgggcagcaagagcgaaactctgtctcaaaaaaaaaaaacagggttttctgctcattgttgctgttgtttttggtttttaaatttcatgctgcttcttgataaattcataagagatagaatagacttccggtagaattttctcaaatcagrccagcattttttctaacaaaagacagctttttctataactataggaagagcacttctgtaagatgaacctgatgctcctgtgttccgagtgcagttagcactttctggagattctgaacatctcatgaaccataatttttttctccatttatactcaggaacactggctttgtaacgctttgcaaaggtctagaaagtcattgtaggctccttggagtgggtccaatgtgactgtggtccagtagatttgtttttttacttagaaataatttttctagcaaagagatagaaattaggtgctcttttttttgctttaagatagagatcaaatataataaaacggtaaatcctacagcacagacagaaatagccatattagagccagacgcagtggctcacacctgtaatctcagtactttgagaggctgaggtgggcagattgcttgaggtccagagttggagaccagcctggccaacatggtgaaaccttgtctctactaaaaatacaaaaattaaccgggcatagcggtgtatgcctgtaatcccagctactcgggaggctgaggcaggagaatcgcttgaacctgggaggcggaggttgcagtaagctgagatggygccactgcacacttgcctgggtgacagagcaagactccatctcaaaaagaaaaaaaagaaatagccatatcacttgttaattaatgctgtgcttttctcataggcaaactcaaatgctgagaaccccaagctgatatcagcaatgctgtgtgctgctttgtatccaaatgtagtgcaggtaacaaaacatttttcctagatctttccattttttgtttgatttgtagccaagtgatgtaagttaagatgtgcatattaatcatcttaaagagatatatacgcatgtgtgcacacacgcacacccttttaaacttagtatacattttcggccgggtgcggtggctcacgcctgtaatcccagcactttgggaggccgaggcgggcggatcacgaggtcaggagatcgagaccatcctggctaacacggtgaaaccccatctctactaaaaatacaaaaaaaattagccaggcatggtggcgggcacctgtagtcccagctactcgggaggctgaggcaggagaatggcatgaacccgggagtcggagcttgcaatgagccgagattgcgccactgcactccagcctgggtgacagatggagactccatctcaaaaaaaaaaaacttagtatacattttcaatccttcagttcccaaaatctgtttggatacattattcaataacacatttattgtataaaatttttaatccttctgacatatgatattccaaaaattaaaatagacataaatgtcagtcggccaacctatatataactaactttctatgttagttggaaacttgattcaactacagtttatcttacactctctactctgaacaaaaagtaaaatagccaggcatggtggctcacgcctgtaatcccaacactttgggaagccgagttgggcagatcacgaagtcaggagtttaagaccctcctggctaacatggtgaaaccctgtatctactaaaaatacaaaaattagctgggtgtggtrgtgcatgcctgtaatcccagctactcaggaggctgaggcaggagaattgcttgaactcaggaggcggaggttgcagtaagccaagaccatgccactgtaccccagcctgggccacagaccgagactctgtctcaaaaacaaacaaayaaacaaacaaacaaacaaacaagtaaataagggacaggcacgatggctcacgcctgtaatccaagcactttgggaggccgaggcgggcggatcgcctgaggtcaggagttcgaggccagcctgaccaatatggagaaaccccatctctactaaaaatacaaaattagccaggcgtggtggtgcatgcctgtaatcccagctactcaggaggctgaggcaggagaatcgcttaaacccgggaggcagaggttgtggtgaggcgagatcataccattgcactccagcctaggcgactagagcgaaactccgtctcaaataaaaataaaaaatcagtgctttgccataagaccacctgtggccagccttctggaaaccctacttgagtgtgctcttggacttttacctgagttttgattatccatccctaacaaggcaccattttcccccagagagtttcaatttggcagaatactgaatcatttttcaaagccttaactttttttattaaatcctcagttaacatctgactgatttatggctcattttctgcttagcatttgtatgcttttcaaaccatttgaaatgtacttttaaaaaaattgtttgtgctttgtagtgtggttatgaaagggaaaaaagtcatttggatatagatttactggtttttatattatactctagtaatgtaaggtcttaccgttggtggaagctgggtgaagggtacaaggaactctgtactattttgccgcttcctgtgagtctataattatttcaaaataaaaagattatttaaaaaagaatgtgggggccaggagcattggctcatgcctataatccaagcactttgggaggctgaggtgggcggattgcttgagctcaggagtttgagaccagcctgggcaacatggcaaaaccctgtctctaaaaaaagaaaaaagaaaaagaatgtggggaaaaatcatttggagacttaaaatgtagaaacaaagaacataaatgtggtataagaagttttaggtgacaatatagttttgaggctaaaccaaaaaggaaaaggagatatatctgactgtatatctaagaactcaccaataagaaagacgtgggccctgctctgttgcctgcctttgctccccaggccccgagtggttcactgagccatgaagacagattccaggcaccaggaattgcacctccaatcccagatgctatgttcagcaaaggctccatggttctggcctacagtgccggcctggacacctcctgcatcctcgtgtggctraaggaacaaggctatgacattattgcctacctggccaatgttggccagaaggaagacttcaaggaagccaggaagaaggcactgaaccttgggtccaaaaaggtgttcattgaggacgtcagcaaggagttcgtggaggagttcatctggcctgtatgaggactgctacctcctgggcccctctcttcccaggccttacatcacccgcaaacaagtggaaattgctcagtgggagggggcaaagtatgtgtcccacagtgccatgggaaaggggaacgatcaggtctggtttgagctcgcctgctactcgctggccccccagattaaggtcattgctcccgggaggatccctgagttctacaaccagtccaagggccgcagtgatctgatggaatatgcagagaaacatgggattcccatcccagtcactctgaagcacccatggaacatggacgagaacctcatgcacatcagccacgaggctggaatcttggagaaccccaagaaccaascaccttcaggtctctacatgaagattcaggacctggccaaagcccccaacacccccaacattttcaagactgagtaaaaaaggggtccctgtgaaggtgaccagcatcaaggatggcaccacccaccagacctccttggtgctcttcatgtacctgaatgaagtcgcaggcaagcacagcgtgggccatattgacatcgtggagaaccgcttcattgaaatgaagtcctgaggtatctgcaagaccccagcaggcaccatcctttaccaccctcatttagacattgagggctttgccatggaacaggaagtgcgcaaaatcaaacaaggcctgggcttgaaatttgctgagttggtgtacaccggtttctggcacaaccctcagtgtgactttgcccacyactgcattgccaagtcccaggaccgagtggaagggaaagtgcaggtatccatcttcaagggccaggtgtacatcctctgccaggagcccccactgtctctctacagtggagagcaggtgagcatgaacgtggagggcaatgatgagccagccagtcggtgacaccagtctcatcaacatcaattccctcaggatgaaggaatatcatcatctccagagcaaggtcactgccaaatagacccctgtacaatggggagctagggccacctcactttgcagattccccaagtacaggcactaattgttgtgataatttgtaattgtgacttgttctccctggctaagagtgtagtggggctgccgggccccagctttgttccctggtccccctgaaatggtcatcaaagggaagggtgaggggcagctacagtggggagctataaaatgacaattaaaaaaaaaaaaaaaaaagactaaggccagccacggtggctcacgtctgtaatccctgcactttgggagaccgaggtgggcagatcacctgaggtcaggagtttgagaccagcctggccaacatggtgaaaccccatctctactaaaaaatacaaaaattagctgggcgtggtggtgtgtgcctgtaatcccagctacttgggaggctgaggcagaagaatagcttgagcctgggaggcagaggttgcagtgagcagagatcgcatcattgcactccatcctgggctacagaacatgactccgtctcaaaaaaataaataaataaagactaaataaaagatctaatagaacctaatagaaaagtgggcaaaggacatgactgaacagataatacatacacaaaaattatattcagtgttactagcaagaagaaatgcaaattaaaacagcaaagaaggccgagtgcggtggctcacgcctgcaatcccagcactttgggaggccgaggagggtggatcacaaggtcaggagttcaagatcagcctggccaatatggtgaaaccctgtctctactaaaaatacaaaaaaaattagccaggcatggtggcgggtgcctgttgtcccaactacttgggaggctgaggcaggagaatcgcttgaacctgggaggcagaggttgcagtgagctgaaattgcgccaccacactccagcctgggtgacagagcaagactccgtctaaaaaaaaaaaggaaaaaaaaaaaacagaaagaaatagcctctttttactttttaaattggcaaaactgggctgggcatagtggctcgtggcactttgtaaggctgaggtgagaagatcacatggggccaggagtttgagaccagcttgggcaacagagtgagaacttgtctctacaaaaaaaatttgtttttaattagccaggcatggtggtacatgcctgtagtcccagctactcgggaggctgagatgggaggataacttgagcctaggaaattgaggctgcagtgagccgtgattgtgccactacactacagccggggtgacagagtgagacactgtctcaaaaaataataaataggcaaaactttttaaaaattataatactgccagacatggtggcatgcactggtaatctcagttacttgggaggctaagataggaggatcactgtagcccaggagttcaaggccacagttagctatgactgtgcctgtgtatagccactgcactccagcctgggcaacacagagagaccctatccctgaaattaaaaataggccaggtaaggtggctcatacctacaatcccaacattttgggaggcccaggtgggaggactgcgtaaggccaggaattgaagaccagcctgggcaacatagcaagaccccatctctaccaaaaatagattaaaataaataaatagttgtttgataataatgcaaataaataaataatataatgctggtgctgtcatgaaccccccaaaatgagtactcttactctgggtgggaatataagtttataccccctttctagatagcagttttattcctagggatttgttattaggaaacaattgcatatatacacaaagatacagctaggagaatattcatttcagcactttatatttgcagacaatctaaatttgaaaaaacagggtatttattggttaaattattataaattcttacaacaaggtcttatatatccatcaaaaattatgttttaggaaaatatgtcacaacatggaaaaatgttcttaatatattaagtttaaaaaagtaggctataaaaaaagattctattttagtttcaagacatgtttattttcaagacatcattgaaaatacatcattttcaagctattttatttatgtgtttatgtttttctctttttctatatataaatataaatttggaagagcagattaaaatgatatttactggctgggtgcagtggctcacgcctgtaatcccagcactttgggaggctgaggtgggtagatcacaaggtcaagagatcgagaccatcctgaccaacatggtgaaaccctgtctctactaaaaatacaaaaattagctgggtgtggtggcgtgcacctttagtcccagctactcaagaggctgaggcaggagaatcacttgaacccgagaggcggaggttgcagtgagccaacatcacgccactgcactccagcctggtgacacaacaagactccatctcaaaaaaaaaaaaaaaaaaaaaaaaaaaaggcaagacacagtggctcacgcctgtaatcccagcactttgggagacagagggaagtagatcacctgaggtcaggagttcgagaccagcctgaccaacatggagaaaccacttctacactgaagatacaaaattagccaggcgtggtgctcatgcctgtaatcccagctacttgggatgctgaggcaggagaatcacttgaacccaggaggcggaggttgcagtgagccgagattgcaccgttgcactccagcctgggcaacaagagcgaaactccgtctcaaaaaaaaggccgggcgcagtggctcacacctgtaatcccagcattttgggaggccgacgcaggtggatcacaaggtcaggagatcgagaccatcctggctaacatggtgaaaccccgtctctactaaaaatacaaaaaattagccgggtgtggcggcgggcgcctgtagtcccagctactagggaggctgaggcaggagaatggcgtgaacccgggaggcggaacttgcagtgagcccagatcgcttcactgcactccagcctgggcaacggagggagactacgtctcaaaaaaaaagttatatttactggtccggttgtagtggctcacgcctgtaatccagcactttgggaggccgaggcaggcagatcgcttgaggtcaggagttcaagaccagccttgccaacatggtgaaaccacatgtctactaaaaatacaaaaattagctgggtgtggtggcgcacacttgtaatcccagctacttgggagcctaatgcaggagaattgcatgaacctgggaggcggaggttgcagtgagccgagatcgcaccagtgcactctggcctgagagacagagtgagactcggtctccaaaaaaaaaaaacaaaacaagaaatgtgttgggattgggatactcagatctctggtccagtgtcatcagctgggtcactgcacctgatcatcagtacagacccaaaatatcaatatagttttctcccacatggcctcaatgtggtatagacacccagagccactgcacctatattcatacttcttggtggaaaaaaaaaaaaaaagcatgtgcttgttctgctttcagaaggaaacaaaataagaaagaaagggaacaaacaggaaagctattcaagcaagactgagcaagactggttttgtgcttttgtgccaagagatactttctatgagaatatatatattatatgtctatttttacaaatacttgttgtttaggtgaaaagcccagaaggaaaatttcagaagaccagtactggagctgtcagaatgcaaccaaaatcagctgagttgaagtttgtcaccaagaacgatggatatgtacacattcacccttcatcagtgaactatcaggtcagaatggtggagtatacttaatgtttacaggtcgtcctggggtaggaaatgcaattccttaaattcagccacaccatgttctatcacttgctgtccccagcaataccactgactgagggaagattgaataagaataaacagactggaaattggactatttctggaaagactatttccatttgaagaaaattctactgaataccaaaaagtactcaagcctgctttcagatataaaattgtttctttgcaatggtaattgaagtcatgagctaattacatcactgaatctgtgccttaaaaggaaatgaatgacctattcttgcataccacttcctcagctctcagcctgccactgaggcttctgcccccaccacttcactaaacccatcagaagtaacaaataacttcttagttgtcaaagccagtgtcatcccttggtcctcatcatgccacctctcacatggtatttgacattgctaatctgtcttcctcttgaaattctccttgatgttatttttgcttctgaaatatcactttcttctctctctctattcatcccctctatctcctttattagcttatcttcctttgctctgaaacagtggttctatcctttgtccttattctctcaccatcatgccctcttcctgaaccaccaaaggcacaacagcacttacacatcccaactgccacttacacacagacgcagaccccaaatctgtctctccagacctgcagtttttttctgagctctcctgctggaaaacatcagctagaagtcttttagtcatctcaaacataaaagctgaaaaatcaaactcatgatccccaattcactcttctctttctgtgctgtcttggtggaatgataccatcaaaaccagaaccctgaagtcacatagactcccacttcttttcttatgccaactgagttggtcaccaggtcccaagaatgcctccttgttgacatctctaagatttgccttttatcccgactgccacttccttagctcaaaccccaaacatcatttgcctgaaattctataataatcttacatctggtgctttctgtctccaaccttctactactctactgctgccagaattacctttacaaaacatcaattagactatgtcaattccttgcttaaatcttcatatccagagtgtaccacacactctcacatgactccttacatggcccttcctataccttgtcaccaaatttgaaacattcaggctgctctatcctctggaactactgaggaccatgttcacaaagcctggaaaggatttccttaagcttagaggagtttgagggtcaggaggtcatctgccttttcagcctgttaggaaccagacgcctgagttagctccacaccccctccttttttatatatactttttgttgttgttgttttgcatgtttctcaagaaagaactactcctcttttgagaatccaaatcgttcatgtatccatgtaatatctactagcgcctaatctgtgccaggcactgttgtaggctgttgaggacagtggaagaaactagatggacacagtctctgccctcaagaagcttatgttctagtgagggagacaggcaatacataagtaaacagaatctcaggtaatgctataaagcaaaatagagcaggatagagagacagagagtgacaggagaggggccctgcacgtggggtggtcagggaagaactccgggatgagaaacaactgagcaaatcctaaatgaagagcaagtcatgcagatagagagaaaggagaaacattccagcagaggacataagtgcaaacatcacaaggtgggagtgtatttggtgtgttccaggaaatgcatgaagaggccagtggagagggatgatcaagggtgagagtggtgggagatgcacggggacgagtaggcaggggtggggtagggctgggtggacctggtagccatggcaaggacttgagatttttatccttggacaccattggagggttttgagccataattggacttattgtttttgtttttatttttatttttattttatttatttattgagacagagtctctctctgtcacccaggctagagtgcagtggcacaatctcagct

SEQ ID NO: 93961 - DNA, 21686 bp, Homo sapiens
  misc_feature (1)...(21686): n = A,T,C or G
aaaattagatggatgtggtggcgggtccctgtaatcccaggtactcaggaggctgagacatgagaatcgcttgaactcaagaggcatagattgcagtgagccgagatcatgccattgcactccagcctgggagactgagtgagactctgtctcaaaaaatatatatctatatataatatatatattatatataatatatatattgtatatacattatatctaatacatgtatatataatatattttatatatattatatataatacatgggtatataatatatcttatatatattatatataatacatgtatatattatatattttatatataatatataatacatgtattatatattatatattcttatatataatatataacacatgtattatatattatannnnnnnnnnnnnnnnnnnntgagactctgtctcaaaaaatatatatatatatataatatatatattatatatatataatatatatattatatatattatatataatatatatattatatatattatatatattatatataatatatatattatatatatattatatatattatatataatatatattatatatattatataatatatataatatatatattttatatatattatatataatatatatattttatatatattatatataatacatgtatatataatatattttatatatattatatataatacatgtatatataatatattttatatatattatatataatacatgtattatatattatatatttttatatataatatataatacatgtattatatattatatatttttatatataatatataatacatgtattatatattatatatttttatatataatatataatacatgtattatatattatatatttttatatataatatataatacatgtattatatattatatgttatatatttttatatataatacatatattatatattttttatatatataatacatatattatatattatatatatatatttaacttttttaataagagaataactggtgatcctggacccccctggatggatgcagagattgtgcaatctgttttttgttttgttgtgttttggtttttttaatttaatttttttattattatactttaagttctagggtacatgtgcataacgtgcaggtttgttacatatgcatacatgtgccatgttggtgtgctgcacccattaactcgtcatttacattaggtatatctcctaatgctatccctccccactccgcccaccacacaacaggctccggtgtgtgatgttccccaccctgtgtccaagtgctctcattgttcaattcccacctatgagtgagaacatgcggtgcttggtttttcgtctttgcaatagtttgctgagaatgatggtttccagcttcatccatgtccctacaaaggacatgaactcatccttttttatggctgcatagtattccatggtgtatatgtgccacattttcttaatccagtctatcattgatggacatttaggttggttccaagtctttgctgttgtgaatagtgccacaataaacatacgtgtgcatgtgtctttatagcagcatgatttataatactttgggtatatacccagtaatgggatggctgggtcaaaccatatttctagttctagatccttgaggaattgccacactgtcttctacaatggttgaactagtttacagtccccccaacagtgtaaaagtgttcctatttctccacatcctctccagcacctgttgtttcctgactttttaatgatcaccattctaactggtgtgagatggtatctcattgtggttttgatttgcatttctctgatggccagtgatgatgagcattttttcatgtgtctgttgcctgcataaatgtcttcttttgagaagtatctgttcatatcctttgcccacttgttgatggggttgtttgtttttttcttgtaaatttgttcgagttctttgtagattctggatattagccctttttcagacgagtagattgcaaaaattttctcccattctgtaggttgcctgttcattctgatggtagtttcttttgctgtgtagaagctctttagtttaattagatcccatttgtcaattttggcttttgttgccattgcttttggtgttttagacatgaagtccttgcccatgcctatgtcctgaatggtattgcctaggttttcttctagggtttttatggttttaggtctaacatttaagtctttaatccatcttgaattaattttagtataaggtgtaaggaagggatccagtttcagctttctacatatggctagccagttttcccagcaccatttattaaataggaaatcctttccccatttcttgtttttgtcaggtttgtcaaagatcagatggttgtagatgtgtggtattatttctgaggactctgttctgttccattggtctatatctctgttttggtaccagtaccatgctattttggttactgtagccttgtagtatagtttgaagtcaggtagcgtgatgcctccagctttgttcttttggcttaggattgtcttggcaatgcaggctcttttttggttccatgtgaactttaaagtagttttttccaattctgtgaagaaagtcattggtagcttgatggggatggcattgaatctataaattaccttgggcagtatggccattttcacgatattgatttttcctatccatgaacatggaatgttcttccatttgtttgtatcctcttttatttcattgagcagttgtttgtagttctccttgaagaggtccttcacatcccttgtaagttggattccaaggtattttattctctttgaagcaattgtaaatgggagttcactcatgatttggctctctgtttgtctgttattggtgtataagaatgcttgtgatttttgcacattgattttgtatcctgagactttgctgaagttgcttatcagcttaaggagattttgggctgagacgatggagttttctaaatatacaatcatgtcatgtgcaaacagggacaatttgactccctcttttcctaatgaataccctttatttcttcctcctgcccgattgccctggccagaacttccaacactatgttgaatargagtggtgagagagggcrtccctgtcttgtgccagttttcaaagggagtgcttccagtttttgcccattcagtatgatattggctgtgggtttgtcataaatagctcttattattttgagatatgtcccatcaatacctaatttattgagagtttttagcatgaaaggctgttgaattttgtcaaaggccttttctgcatctattgagataatcatgtggtttttgtctttggttctgtttatatgctggattacttttattgatttgcatatgttgaaccagccttgcatccgagggatgaagcccacttgatcattaaaaatatggaacgcttcacgaatttgcrtgtcatccctgtgcaggggccatgataatcttctctgtatcgttccaattttagtgtatgtgctgccgaagcgagcacacaatctgtttttttaaacaactttgttgagatatgattcatataccataaaatttgacctctcaaagcatacaattcagtggtttttagcatgtttgccaagtcgagcagccatcatctctatctaattgcagaatattttcaccaccgcagaaggaaaccctgtccccactagcaggccctccccattcctctctcccctttccccagtcataggcaaccacaaatctactctctgtctctgtggacttgtatattctggatattttatataaatggaatcatatgatcatatatatatttatttatttaactttttaaaccatttcacttttattctattgagaagtgaggttccaaacagactttactttccaaactgtttacctattgtcccagcaccacttctctgtccccttcaccttctttggtgattggtgatatgttccagtttttgctatcagctctgcttctgggccctcaattctgccccattgatgtttctgttcaggatacctacagggtgtgaagtcagataggagttgatctaaatcccagatctcatatgttagctgtgacatccatttattaatttatcctacaaatatttactgaattctgtgccaaggctttttttttttttttttttgagacatggtatctattgcccaggctggagtgctggagtgaagtggcatgatcacagctcactgcagccccaacctcctgggctcaagccatcctcctgctcagtctcccaagtagctgggaccacaggcgtgtgccaccacagccagctaatttttgtatttttttgtagagacagggttttgccatgttgcccaggctggtctccaactactgggctcaatctatccacccaccttggcctcccgaagtgttgagattacaggcatgagtcaccacgccccggcccaagtcttaacctaggcactggggacccagcaatgcagatttggtccctgttttaagcagagggaccaatacaatctggcagggaaagttcctatggatagaaacacagacacaaacagcagcggtgagagtgaggcagtttgtatatattttctttttatatcttaatcttcataactggccttaaggccccattttccagatgaaaaaactgaggttcagagcagtcaactaacttgcctgtcgcaaattcattgcgagtggcacaccaggcttggtaagtggtaaacaaggctgatgtcgagcccttgggattaagccctctgctataccaaggagaaagggccatagagggccagtgagcgagaggcaggccgggagaaaggaagaacagctggtccaaggtctcagaacaggttcgtttctggggaaagacccctatctctgctgccccaggcagaagaagacttgggccctttgaaaggaaaataaagcctcgggatccccaaatcactaagccaagggaaaaatcaggctgggaactatgtcaggcaaacccacctcccattttattcctaaataagatagctacatacctccctcacaaactgcccacaagaaaattcgttgtgggcctcaaggtctttatcctaaaacagttctgttgaatttcaccctggcaatgtaaactaatagctgatcttcagaggtgcagacagaaagtcatccttctgctcacctgagacaaatgcatatctgattgtttcctctgccctattgtttacgtaaaaatgcagattcactgagtcagattaaattgtgtattcagtggaaggctgatcaaggactcaatgcaatctttcatctcttatcaaccttttgtctcttatgacctggaagcacccctgccgccttcaagctgtcccacattgccagactgaaccaatgtacatcttacacatattgattgatgtctcctggctccctatgaatcaaagcaagctgtaccccgaccaccttaggcacatgtcaggacctcctgaggctgtgtgatgggtgcatccttaagcttgacaaaataaactttctacattgactgagatctgtctcagatatttggggttcacagccctgtcatctctgccctcctccccacctcctgccctgggcatggctggcagacaaaaacctggagagcagcccactccctgttgattgtccttcactggaacaggcagaggaggttctgggtcacagcacagaggtggggtgtaagcctgcaggagattacagctgatccctgcagtggggctgccccaaggtggtggcttcagcctgggagggccagaagagctcaggtgagacctcagcagtccacgtggagagggagggaggggagagggtggggagatgactagaccctgagtgacgcacacaggctcccacttccattcgaagacacttccagtgagatgcttaaatctgcagtggagggcaagagacacgaccccaggagacagcaactggtctctgaggcggtggaaccagctccctgttggagtctgaggccttggtcctactcccagtttcactcctggtttgctgaatgatctggagatctctgggccccacggctttccatctgcagagcggaaagagtggatgggaagtttctaggttccctccacttctcatcattgccggcattcgcttataacaggggtcggactcctctctgtgcacctgtcctgcgggcagacctaggaaggtacatttttctggctgggagatttgggctgagcagtccagggtggccgaggtttagaggggacagctaggaagtacttcccctatcccttaagatctgggctggactctgctcttcccatagggatctacctgaagcccaggaacaccggagatctgactcctgaaactgcctttgcaaaattaaaacactgagagaaatctaacacagctgactccatattgctgctttttttaaaaaaaaattagcttttggtgtacaagtgtttttttgttttgttttgttttgtttttgttttttgttacatggatgaattatacagtggtgaattctgaggctttagtgcacccatcatctgagtagggttaattgtacctaatgtgtagttttttttaatctctagcacccctccagcctcccccttctgagtctttgaaatccattatattactctgtttgtctttgtatattcatagcttagctcccactagtaagtgagaacatacggttttgggttttccactcctgtgttacctcacttagaatactggcctccaggctgggcacagtggctcatgcctgtaatcccagcattttgggaggccaaggtgggcagatcacttgaggtcaggagttggagaccagcctggccaacatggcaaaaccctgtgcctactaaaaatacaaaaactagccaggtgcggtggcaggtgcctgtagtcccagctactagggaggctgaggcagaagaattgcttgaacctgggaggtggaggttgcagcgagccgagattgcgccactgcactccagcctgggcgacagagcaagactccatcttaaaaacaaaacaaacaaacaaaaacacacaaaagacttatttgggagctctggctcccagggcctgtggggagtggggagctgggggctgggaggaggctgggtcatgagagcaagtcttttccaggatgccaggaccatgcccggtagagggctcagttggagtttcagggatgagcacctgcctcgggggcctgaaggaagcccatggaaggccatggccaaagaagctcatcgccctggggccagaagaatctgcccagcagatggtcctgtggaggatccaggagctttctgactgagtatggagggaggtgagagacggggagttgtgagcctcaggtcttccttagtggcaagaaataaggctttctgtttcaccgttctgtaacgccattaggccgtctctctcaaggctctcttgttctggggctaatgggaaagcatgacttttgttcttcctgccctgcctgcttccaccactgggggttttacccagtgccaagctgtggggtcctccagctttggtctacaaagatgattgcctgcttgtcctcctggcttccctggctccctgggtttttagggctgtgctgcctctggacatattctcgtctggacctgattgtcaccatcactggagaacctgttggcagtgcagactctttgtccaccctagactgactgcatggagcacacagttgacaggatcctgggggatttgcctgcacatgaaggctgggaaggcctgctctagactcacccggtgacttaccatttccccactggcttccaggggctccatcctaccacccctcagattcccttagggcacaaagtctcagctctcttaccatcttcaccaccccatccccgccagtcaggggaccctcttcctggtcagggagggccttctatcggtgtcaccatgacattcttcttgtaccctggcatcctcttctcccaagggctaagcttccctaagaaggccgcctcctgcctggccacatctgcctcctgcctggccacatctctccccagggacattatagagccagacactggcatcaataagggggagaagaagagagaaaattagaagaaaaaaatagatatctcgaaaatatcctggcctacaggtgttcctgaagccatttccttttgggattgaatgtcaactgtgctgctgtccagcagtaagaacttgggtgaggcactccagccctctgcacctcagtgactgcatctgtgcaatgggaatgatttatatagtatctccatcccttcccccagcacagtgtgtggctcatgacagttgattaatcagctcatgctgcctgagtccatgcctttttctctgtggctcagttggatggaagctccacaaagacgaggatttttgatctgttttcttcactgctctttccccagtacccagactagagcctggcacagagtaggtgctggataaccctgttgaatgactgtagaacaaatagcctggagctgccccagcccagcaggctcctctctcctacccaggaccgtggcaaggcagaatggaacagtgtcaagggcggtctccctaggcttaggagacctgggttcagaccctgtctttgccatgcttttgctataggactttgagccagtgaccacctttttgagcctttgcttccccatctgcaaaatggggataacagcagcctttacttcatagagctgttatgaggattaagtgagataatccagcccctcagcctttcctccctgtctccctgccccgtaggaccagcaagaccccttcatactggctgacctggacatactggccagctgccatcaggccttctgccaagccctgccacaggtctcgcccttctatgcagtgaagtgcaacagtagcccttgggtgctgcgtgtcctggccgccctgggcaccggctttgactgtgccagccaggtaagcctgtgcccaccgaggattaggccaggccagctggaagggggtgaatcccatgctgctgctgctgaggtcatgaataagcgtcccctgtcccgcagagcacttgaaatatgctaagcacactgcagggggcctaacatgcattctccttgatcctcccatcggctctgcaaggtagtcaggggatccacattcatagaggaggagacagccttagggggatcacttgcccatgggccaacatatggtaagagacagagatgaccgatccaaagttggcatttttttcttacgccaggggtgaaacattccaaggggttcttagcagaaggggattcagcaatgttgagggaggttagagccgaagcccaagggtgggaagggggagaactcaggatgggagtattttgctgagcctctgtccttccttcctttctttttaagactagtcaagtgtagtagtgagaagtgggaaagaagagtagaacaaggagttcatctgtaactgactgttaacagtcaattgagataactcactgccttcggaccagcccttcctccctttctgaggagccctccactaagcaggattaagtgcacccgctgcctctaggaagccagcccatctcctctctatggggctgaaattgatgggaggggggttggttctaaactgagactatgagcacctggagtgcccggcacattgagactatgagccctgccctgcccttccctgccctgcagggactccataatgagcaccccgtcagccccacgcagggctcctgcctggaagtgagggagcagggggtgagacccaacccggggtttcatcagggcagcctctttggctcatgcacagtgtttctgtccccacatagctggggtgggggcagtgatgcagcccccaaccctggctcttggccaccccaggtggaactggagcaggtgctgggcctgggtgtggccccctcgcgcatcgtctatgccaacccctgcaaacctgcctcccacatccggtatgctgcccagcacggggtgcagctcctgacctttgacagcgaggaggagctcaccaaggtggcccagcaccaccccagggccaggtgagtccagcagggatgcaggcagctagggtgagggtcagcagtaaagaacgaatcacccaacacagcacacccctgacaaatgctgatctgagacaagtgaaggggaggaccctcaaggcccagccattttaaaagggtctggcagctgcctttggagtgagacagcccaggttcaaattctggcattgttgcttacctgatgtatgcattgggcaagttttttgtttttttttttttttttttttttttgagacggagtctctctctgttgcccgggctggagtgcagtggcgcgatcttggctcactgcaacctctgcctcccgtgttcatgccattctcctgcctcagcctcctgagtagctgggattactggcgcgtgccaccatgcctggctaatttttgtatatttagtagagacagggcttcaccatgttagtcaggctagtcttgaactcctaaccttgtgatccgcctgccttggcctcccaaagtactgggattacaggtgtgagccaccgtgcccagccaagtctcttttttttgagacagagtttttctcttgttgctcagactggagtgcgtggtgcaatctcaggtcaccacaacctccacctcctgggttcaagtgattctcctgcctctgcctccggagtagctgggattacaggctcctgccaccacatctggctaattttttgtatttttagtagagatggggtttcactatgttggccaggctggtctcgaactcctgacctcaggtgatccacccgcctcagcctccaaatgttctggaattacaggcttgagccatcgtgccccgcctgggcaagtctcttttaacatttttaacactcggttccttcatttacaacttgggggcatgttgtctggcacatagtaggtgcttaccaatactatcatttttctaccctcccttctctggttgtacctggggaagagtagatgtatacacacgtgtgttgggctggtgtgatggccgcatggatttggtggcattggaaaacctcccagatgcggggatcagctgggcctgggtgggggtggtataagaagccctgggctctttggcatctctggctaagtgctctctgcctcctccctatccttggtgtccctcctccggactgctcctccggctgaggacccaggacagtcagagcaccttccctctgagcaccaagttcggggccagcctggaagcctgtgggcacctgctcacgtctgccagagacctggggttggccgtggtcggagccaggtgagtgacgcctgaggactccaggagccctgggttctggtccttcccttgctgtggataactgcgacagagacagcgagacacagtcacacataaggcacgaaaccactggggccaaatgcagaaacaaacagctggaaatataactgactacactggcataagtgtaatcagttggggcccatggcaagctgtggcccctctctgggcctgtgagaccccatctgtctaaaggggcaggatatgatgtgaaggttactcagggcctccctgctctgaggccctggggtttggtgtcttgttgtgaagtgtccatgaggggaagggcagcccacgtggcagtgctgnnnnnnnnnnnnnnnnnnnngtttctgttcaggatacctacagggtgtgaagtcagataggagttgatctaaatcccagatctcatatgttagctgtgacatccatttattaatttatcctacaaatatttactgaattctgtgccaaggcttttttttttttttttttgagacatggtatctattgcccaggctggagtgctggagtgaagtggcatgatcacagctcactgcagccccaacctcctgggctcaagccatcctcctgctcagtctcccaagtagctgggaccacaggcgtgtgccaccacagccagctaatttttgtatttttttgtagagacagggttttgccatgttgcccaggctggtctccaactactgggctcaatctatccacccaccttggcctcccgaagtgttgagattacaggcatgagtcaccacgccccggcccaagtcttaacctaggcactggggacccagcaatgcagatttggtccctgttttaagcagagggaccaatacaatctggcagggctccatggcagtgtgtgtctaagtgtgtgtacgtgtgaatactcagggtgagtgccccttcgtaggtgcctcgttggcctgagtgtgcagctgtctgaaagcacacacttatgccagtgtaatcagttatgtttccgctstttgtttctgcatttggccccartggcttcatgccttatgtgtgactgtgcctctctgtctctgttgcggttatccacagtctgtgtggctttgtggtttggaacatgtgtttcagtacatatctctcaccatgtcacatgcactggctctgctagcttccacctgggctccaactgccagacccccccagagcttcacacaagctatcgctgactgccggtgcatgttggaaatgggccacagggctgggcatgatatgagctgcctggacattggagggggcttccccggaatggagggctccgggcccaagtttgaggaggtgagctggtacgggcgctgggggtgttcagggaggtccgcatgtgtgcccaggcatgggtgtgtgtggggagtctgtgttcatgcatgtayctctgtgtgtttaggtctctctggtgtatctctgtgctctgtgtgcacaggtgggtatgtgtgtatgtgcatgtcttggctttgatatcccccaaaagcagactctgagacaaacacttggatacaagtagtttttttggagatgatccgtggaagcgccaatgaggaagtcaggaaagagagatagaagggagaaaagtcaaaagaaaattcatctatgagctggttaccactgtgggccgctgcaccagtccccctggggacaatgtagaacctcagaatcatcccactagaggacatggggctggtcctttattcaccaactcctgtccytctttggttgaaggctgtggtctgggggtgttaatttcctcacattccagctagttkccgagggtgctggagaaagcccacagaatgagaagcaaagggaggcaggcrctggaggctggaaatcattttgcacgggcagatgagctcaggtaggctgaggggaggtggcacagggtgtccactgcagctgcagcaaggtgtctgggggctgtgcctctctgtgtgtctgtgtgtctgtatgtgtatatgttttcctgtagaatgtagaattcttgttagcatcaccaatacagttacagttacagttgggagtttacattcccygggtccacaagacactcgccttcttacggtgcatcagattaaattgctgcacctttggacttctcagggagcctggtggccagcaaccccacacaagtgacctcctgtctctcaacttctgtttcctctttggtaaacagggataattctaatgcctacctgcagggtgcctcggggatgaaaggactgatgcaggtaaggcgttggcacargcgctggcacatcaacacgtgctggatgagttaacctcttcctgctgtccctccaccccattccagttggcgagagtgatcagtgctgccctggcccaggacctccctgaggagcgtggtgtcaaggtcatcgcagagcctggctgcttctatgtggagtctgtctgcatggccgctgtcaacatcattgccaagagggctgtgctggagcccggtgggtgggccaggatggcactgggtggggatrccmctgtccaggtgtccccaggccctggaggagaggaagggcagagggttgggctctgtcccaggagctgggggtcagagtagtgactgagcactccccaggaggcagccggaagctggtgtattatctcaamgatggccactatggctccttccgcctctgctaccgagagcctgtcccaagggttcccatcrtggtgaaggtaagggggccactccagccccragtctagtcccttaccttgaggtgccttgtgcctcccctaytgggaacagtggctgtgctggaccccagaggcaggtcctggcctgctgcttagaacacatgtggacacgtacatgatgtgtgctcacagatcagagcgtgtgcagcagctggatatgtaggcctcctcaggcaaaggggcgatcaccagaacacaaaggcgtgggttgttttccaaaatattgaagttcttctccctggtggcttaagagccattccttctycctggtggttaaagagctattcccccgagtccaccaggggcctccctgccgacactcttgctgctcagtccctcccacgatctggcaacaaagcttcaatacctgaccctgtagggccaacaggatcttcctccagctctgcrgcagttgtctcctaatgtgatgggttsgtgtccgggccacactgctttgtaaatatcttgactgtttctcccggccagtgaacgtcttggtgtgtgcrcacatttggtcatgtatgtgacgtgtgtttgcatgcatgtgcgagtgtgtacgtgtgtgaagtgtttctgggtgtgtgtcttcgtgtgtgtatttgcctctcttctcatcggaaggagtgagttctggatgtggaggaaccagtaggagaccctgtgtttgtttggttcccacaatagttttcaattttagttgcccatattaaaaaatctagacatatttcataaaagcctggattttctcagctcctctcaaacatttgagagatctgatgatacgtggcctgcagaacaacaaggcaacaaataattcaacaaattagtctagcatgtcaggcactgtgatctgctggaacgggacttcctcagtggctttcccctttggacagacattgactttccagtttgttgtaagacttacctggcccatttcactcatttgtgttacctgcttgacctctaggtaattgagttttcaactgctgccttatagcaattattgaagacaacagccccacttacagaggaggaatctgagcccttacttgtaggcacatcagacctggccaggctgggcaggggccatggagggatgggtcccagccagtatacacccgtgtgcccctgggagtgtccttccgggtctttcagtgccttccagataagggggtgggataggccagcctgctgtcttttctgaccccctttcctatgtcacacaggagttctgctcagagccrcccctcttcccctgcaccctctatgtcccatgtgcgatgcctttgacaggctcttcttggaggatgtgcggctgcccgagctggatgtaggcgattggctggtcttcccctccatgggtgcctacatgtcctccatgagctccagcttcaatggcttcctgccygccaccatctgctacaccatgggcccccagctcaggtgcctaggggttggggttgaagaggaagcaggaaacctcacactcatttgagcttggggtgggaactggccccagggaatctcccttcccctgttgactcactgaagtcaaagtgtccatctgacctttggactctcatctgcctctggcccccctcccagggaggtggagaattgcaaagagatccccaggccctctagccactggctggccctactcctgcttcagacgcccactgtcccagctctgcctccaggccccagctctgctgctgtgtgtgcagcctcagggctgtaggcaaaggccttgacacccaccctgtaccccatgtcctttccccatgagccttctggaggcagagccttaacccagagccagctaggctggagggctttaagacactctggtaggtaggcccctgggaactgttgggagttgggatggcagggaggaggcagaggtttgggtaactatgaaatcctatgcagaccttccaaaaatatcttgctgtcattttgggtcagttctttccttttctcttttcatttcttttcttttcttttttcttttctttctttcattttcctttcctttccattcctttccttttttctttctcttctttctttcctccctcccttcctccattccctttctctttctttcctctctttttgagacagagtcttactctgtcgcccaggctggagtgctgtggcatgatcttgggtcactacagcctcgacccctcagggctcaggtgatcctcccacctcagcctcctgaatagctgggactataggtgtgtaccaccacacccggctaatttttatatttttggtagagatggagttttgccatgttgcccaggctggtctcgaacttctgggctcaagcaatccgcctgcctcaacctcccaaagtgccggcattacaggtgtgagccaccgcatgcctgtgtcttcggtcaggtcttacactgacttttctcagcagtggcctgccctgcccaccctccttgtcatttgcctctgcatccctcctttcccactctcttgagcagtggttgaaggggacgcattagaagctacttcttctcagagcgactacaaaaaatgggctattgatcttttacgttaaataatgcagcccacacacctgctcagttcatacctagctggtgtcagtttacatccttaaattcatcctgccgctcctccccgctttttatttattcatgcccttgccttgtcccagaaagcgtttctataaaattcatcaacatatcatagtggttaagagcatgtcactggaataaggaagaactgggctcaaatttaggcaccactgctactagctttgaatttgggcaggttaactaacatagttgaactctagttttccttgtaaaatagtggtaataataataactttaacttccccgtagggttgttgggattaagagagggatgaatatatcgtttagggccagcttttccttcggccaccctgttcttgctggctctcctcctggagtctagatgtcacagagaccccaccgtgcatcctgggtcttttcagagagtgttggtagggtgtcccactcaggccaagccaggatgtgtgcccgatgctagggggacaggggaggcaggcacagacccagtctttgagttgtcctcaggcctgtggaaagctaaaggcaggcgcagctggctgcagcacagggaggaacatgggacatactttgaggacagttcaggtggaagccatccatttggaggagtgggtggcttcttggagggagaatggtgggacctggaggcagagcagaatcagtaggtaaaagtgggtaggaagcgtggctcaggtgtgggaacaacttggctcaggcatgggaatgagcctctgctcagagaacagtgagtggccaggattggagatgagaaacagagattgcagagcctggggacacaaggtgaccagtttgcctggatttgtctggaacattcctggtgctagcactgtaaatcctgagtcctaggaagctcctgagtctcaggcaaaccagatggttggggagggagaggagggaggggaggagctcgtcacaccccaaggccacattcctgcagctatagcaggtacagccattgatttctcagcttccagctcagccaaggaaggtgtctcccctcccttcagcagggcctctcccaccctctctgctaccactcaactcagccaggtcctcggggatcccagagtccctggagctgaagaggaacttcccctgacatgtgggaagcaaagagcagattggggtaacagaggccactcagagaagctagaggagctcaacagcccatccagtcaggtgcatctcatgagggcatcccagaacatcaaatttcccrcctgcaaaatggtcttggttatgcccaaacactcaggatataagaagcacggattatgggtacgatacttaggggtgtgagcaggctttgggaaatgtgaactctttccagatggaagacattccagtgagttttctttgcccctggggggtgggagagggtgagtgggtctgagtatgtaagtcacaggtctccaggtctaaccaaccagtggcggggtgagtagtttggtgggaaggacagttaggaacaggtaactaaaggtgagttaggtcagagcaggtgaccaggggtgattcaggtcaaagcaggtgactgggatgagtcaggaygcagagcaggtaaccaggggaacagatgtgaactgctgattaaaactggggggaaatgttgtttactgaaactacggggaagttaaactttaaaatggaggacaaagaactgaacatattgacatattgattctttgaagagaaattttgaactcattgtatccaacaggaggatcatgtgagcccagcagtttaaggccagcctaggcaacatagaaagactctgtcttatttttaaaaataaaataaaataaaaatgacagaaatgtattctctcatagttttggaggttagaagtctgaagccaagggttggcaaggtcactctccctctgaaggctccagggaagaatatttctttgcctcttgcatcttccagtagccccaggccttttctggcttccggcagcataactctagtctctgcctcacaacgtttttctctttgtctctgcgacctcttgtcttcttataaggacaccagtcatccagtggacacaaattttgtgggggcatgatttaacttcaacctccaaccccctgccgcaggtcaccctttggcccttatggcctccaagtcttgcggctggagctcacttctcagcctggggtcatctgtgtctactttccatagcaccaggattcacctctgctggtggttcccaggttctctctccagctgtgacctctctcccacactccagacctgaaaatctcacagcctcttgatcaccgacccaaggatgtaccacagttcactcagattcaacacaagccaaagggagcccgctatgggcccccatctagcggaagggctgcttcccttagccagagtgtacctcactcctcagctagaaatctgggctttgtcctccattttgaacttctccatcacctccctcatcaatgggccaccaagtcattcacactggaggtggtagagaaagccaactgtgtgccaacagctttttttttttttttgaaatccttcctgttctacccccagaatgtctcatgcacacagcccctcccttcttccctctctcccaggtcactgtcaggttccagcccctcactagttctctccagagccagcataacagcctggtggcctccctgctgtggtctcattttctctaatccattgaccacatgaccccacaagctccttcttttttcttttttttggagacagtctcgctctatcccctaggctggagtgcaatggcatgatcttggctcactgcaacctctgcctcctgggttcaagtgattctcatgcctcagcctcctgagtagcaaggactataggcatgcgctaccatgcctggctaatttttgtatttttagtagagacggggtttcaccatgttagccaggctagtctcgaactcctgacctcaggtgatccacctgccttggcctcccaaagtgctgggattacaggcatttgccaccacacttggccaccacagagtcccttccaatgtgctctcctgagcctgatgcccactgtgtaatcccatttgcggcagcccatatgtgcaggataaagtccaagcgccctagtgttatgggatctttggggtgtcaattttttggctggaaacatctgtggccacagcacctttgcccaagttcttgtcctgtgtccaggaagaatgaggtatgcagacaagcaaagagcaaacaagatgaagaagagttttatttagtgttacaacagctcagagactggcagtgtgtagctcctctctgcaggcaggtcatctgtccagtgttcagttctcagcagagaggaggcctcggagagggtggctcctccctgccagcaggttgtctctgtagctctcagtggagaaggtagctcctctctgctgctagtcatcccatcatctccagctatcagcagagagtactcctctctgcagctggttgtgccattgtctctctgctctcctcatcctctggccatcctctgatctgctctggctgagcctagggcttttatggaccttttatcagggaggaagtccatgccaattggtccacgggcagccatgggtgggctggaagaggcaccatgagtccccactccagtccatgggactggcagcctggcccgcagccttcaggccttccctgacctgaaagtggggtcttactggggacctgcccccttctgcccaggactctgtctgcctcccgctgccattcaaggccccagggcttggccccaaccccgctctgagatgggagcaggtgccaggagcagatagaggccaggcagcgggagcagacacccctgagcctgcaggccaccactgggcccttcgtcccaccggcagagggagagctgaccttcttctcttacattctcagcacctgtgaggtggaaggggatgcttttatgatcacttcctgaaagagaggctcacagaactgaactgatgtgcttgtcatcacacagtggaggactgtctaacaccaagtctctcattcccttggtggccagcccctctcagacctcagcaagtccctctgggccttcatgggagagcagtgtccaaggaatgcggtgtcacgcttgcggctctgccaagggcttcttcttcgggctctgcctctagctgcttctgacagaggcggattcatcatgaagcaaatgcggctgaaccccccagtggtcttcattcttctccaacccctttcaagacccagggatgggctcagcaattctgttttaataattttgcattctgtcccttaaatcataaagagagcccccaatctgtaaagcttctgatcccacacaacctctcagggctccagggtcctgaggaggatggccaggtcactgtgggcctgtggtggagccagcgggcacccagggcttcctggtgggccaggtccctggtcatagactgagccagccagcatcagcctccgatctccaggcccctgcggtgagggccccaatgcccctgataaggctctgctcctaaagggctgttggccttgaacaagctgctctcctgcctcggtttctacttcaggatggagacatgaatgagagaagtgtccctgaaactcctgatggctttccatttcctggtttcctgtctttcctgaggctgaattcttcgcctgctttctctgagatccctcactttcctgccaagaaatttcctctttagtctgttcagagt

SEQ ID NO: 93962 - DNA, 37300 bp, Homo sapiens
  misc_feature (1)...(37300): n = A,T,C or G
gcgatgggttccaacatcctcctttagctccgagaagtttgtcattaccgatcgtctgaagccttctcctctcaactcatcatagtcattctccgtccagctttgttccattgctggtgaggagctgcattcctttggaggatatgaggcactctgatttttagaattttcagcttttctgctctggtttctccccatctttgtggtttttatctacctttggtctttgatgatggtgacgtacagatggggttttggtgtgtatgtcctttctgtttgttagttttccttctaacagtcaggaccctcaactccaggtctgttggagtttgctggaggtccactccagaccctgtttgcctgggtatcaccagtggaggctgcagaaccacagatattgcagaatggcaaatgttgctgcctgatcattcctctggaagcttcctatcagaggggtgcccagctgtatgaggtgtcagtcagcccctactggggggtgcctcccagttaggctactcaggggtcagggacccacttgaggaggcagtctgtctgttctcagatctcaaactccgtgctgggagaagcactactctcttcaaagctcagttggaaatgcagaaatcacccgtcttctgagtccctcatgctgggagctgtacattggagctgttcctatttggccatcttggaacctcgattttcgagagttatttcttttaagggaaaagggagctggcaagtttgaaatcggtaaggcaagctggaaggctggaaattcaggtaagagttcagtattgagtctgaaatctacaggacaaggcaagtaggctggaaattgtggtagggtctctgtgttgccatcttgaggccagattctttattcttcaaaaaacctcagtctttttttttttcttttttcagacggagttttgctcttgtcacccagattggtgtgcaatggtgcaatctcagctcactgcaaactccgcctcctgggttcaaatgattctcctgcttcagcctcccaagtagctaggattacaggcatgtgccaccacactcggctaattttgcatttttagtagagacggggtttcaccatgttggccaggctagtctcgaactcctgacctcagctgatccacccacttcggcctcccaaaatgctgggattacaggcgtgagccactgagcctggccaaaacctcagtctttattcttgaggtcttcactagttggacaaggcccactcacattctggagggcaatctgctttaccctaagtctactgatttaaacgttaaccacttcttaaaaataccttgacagcaatatccagattggtgtttgaccacataacctggccccataaccaaataggcacataaaatccattatagtaggtaagacttcgtcaaagaggtctagaaaacatttctgggagaaattaacgaagacccaaataaatgaagcgatatatcatgttcatggattggaagactcagtgcaagtattataaagatgtcagttctcttcaaattgatttttatatttaattcaatcacaaaataccatcagggagtgtgtgtgtgtgtgtgtgtgtgtgttgatattattctaaaatttatagggaaatacaaagcacccaaaatagcaagataggcttgatgaatttgaaaaacaagttaaataacttataccaagaaatatcaagacttataaaattattaattaaaattatctgttattggcacacaaatggacaaatagcagtagaacagaacagatcatatgcatgtgtgcaatcccctgatttatgacaaggtgacattccatgcattgattaaaagacggtcttttcattaaattgtattgaatccattgaatattcatatttttatttagaagggtgtcaaactccactaccacatacatacacaaatacattacagatgcaagttcttggatctaaattagaaagggaagattatgaagcttttagaaggttaatgtaagagagaatatctgttttagcttgtggtaggcaaagattttctaaacaagatgcataaaacattaactataatgaaaaagataaataactggacttcattaaactttaaaacattcttattcattcaaatacatcagcgatggtttgactgtgtgccccaaagttcatgtgttggaaactaatccccaatgcaacagtggtgagaggtgggaccattaagaggtgtttaggccatgagggctctgccctcacaaatggattaatgctactattgtgggagtgggttcctaattaaaggatgaattcagcccccttcttcttgctgtctctcgtttactcttgtgcctttcaccttctgccatgggatgatgcagcagaaggccctcatcaaatgtgactcctctttctcggacttcccagcctccagaaccgtaccagtctgtgatatttggttataggagcacaaagtgaactatgacaacatcattaacagggtgataaggcaaactacagagaggaagaaacttggcaatacatagctggcaaaggatttgtattcatatataatttattatgtaataattgctcattaattatttataattcctacaaatcactaaaaatccagacaactacaacgttcaacacggaaaatgatttaataggtgctctctgaaatagccaacaatcttctgaaatgatgctgactatcctaggtcactaggaaaattcatactaaactttcaacgctcagcctaggcaacatggcgaaaccctgtctctactaaaaatataaaaattagcctggtgtggtggcatgcccctgtagtcccagctactcagacggctgaagcgggaggattgcttgagcccgggaagttgaggctgcagtgagctgagatcatgccactgcactacagtctgggtgagagagtgagatcctgtctcacataataaataaataaataaataaataaataaataaataaatactcaatgcagttttagtacaagacccaactgaatggctttgcaaaaaaaaaaaaaaaagacaataccaaacattggcaagtatatggagccactggaactatcagagattgctcatgagtgtgtaaattggtacaaatgtggaaaactggcaagaagtactaagtctaaatgtatgcatgccttatgacctagcaattccattcctgggcatatttacaggaaggagaaatatgtacatatgtgtatcaaaagacatctacaacaatgatcatacaaaattcctcacaacataggaaaactggaaacaactgaaacatccattggcagtaaaatgaataataaattataatatattccaacaatggaataataaacagctgtgaaaaataagggaaaatattacacatggcaatatagtcaatatagattgtcataaatcaggtgattgtacacatacatatgatctgttttattgctgttttccatttgtgtgccaattacatgattttaattaataatgttataagtcttgatatttcttggtataagttatctaacttgtttttcaaattcatctaaactcagggttgagtttaggaagccagatacgaaagagtgcatgctgtatgatttcacgttgtatcgcatgatctgggttgtggttacatggaagtgatggtttgttcatgaaactggacgtttgagtgttgtatactttatttgatccttgtacttgtgattcaaaatttcataacaacttcctgctaccctttatgatttgatgtgtgtaagtagagtttgcagataatgtagttctatactgagctatgaatttatttttataatgtacattgttttgtattaagaatcattccaagtgacagaaaatttgcgaaatcaaagtattaacatttataaaacccttctgttgtttatactattctggccatgactttcaaaagcactgatttttagggggacagagtatcaaagaaagaccttggctaaagaaagctctttcaagtgggaagggcatcatagagaatggatcttgaggagtgaaagtcaggagatgccttcctactcagctgcatagctcatgaagctgacaacccgcagagttataaatgttgtgggtagattgccttcacactggccttgcaatcatctgctacactgagcaccattacatttcatggtggacattctaaggtgtgacactgtgtactctgctgtcaggaggctttccggggagaagggtcttgccaaggatttcttgcactcccagccacctgactggtttagtctgaaatttcagtattccagggtagtatgagaaaggccctatctggtaacaaagaaagcataagaaagatggctaagggaacaaagggacaaggcttttattttgttctttacccacagattgccttcaaaataaagataaagcgtctaagcctggcagtgcaggtctctttaagctggctccatacccacccacctcatcctgcacctgtcactgcgtgggaccctgtgctccaggcaggggcacctcactgccccctgagctcattttacccctcctggctctgcagcatttctgaccatttctgcccaggccgagactcactgctgcccagagcaatctcccttctctccttctggaggggaggggttgtatgttacccgcctggttttatccacagaggttagcagagactgatacagacaaaccctttttctttctaattttagattcaagagcacatgtgcaggtttgttaaatttgcctgacgctgaggtttgagtttctattgatcccctcacctgaatagggaacacagtacccaatacacagtttttcaaccattactccccttccttcctccccctattttagaatccccagtatgtagacaaattgtttacttttatagctgtaattaaccttattatagctcagcctcaaccctttagagaggaggaaactaaagcccatgagacttgcttaaagatactaagtgaacatatttattttttaaagtgttaaagtgattaaacaatgtagacgtgaatgaaataaaaagcgtaagttccccatcttcattcccactccatagagctgatcagtatttttacttgcagacattagtggagccgtagagaaagaaaccttttctccaaaagaaggcattactttacacactccgttctgcaacttgttttgttcacttgctatttcacgtcagcccatgcagatgacttaaaacaaattcaaatggagaaaagccttaggcatgtttttctctgcactaaagaggccctgcaggtggctgtgggcaacttatgcagtggcttcgagtgaacgaacgtaattagtaattaagcaaagcgggcatccaggacattcagtttcatcttcctggcactttagtgtttaggaagggcctggcctctcggggagcgacactcctcgcccggccactttgtaagaagcatcgagcgtggaaaaggggctggggtcagcactggggccctctgccgggaagagagactggcggccagcacacgcgtctccccaggctgaaatggggcaccctctcgcggtccttccctcccttcccgggctgggtggcaggtcttggctcttctgcgagtcccccgcggctgcggtctcccggcacccgctgagcagcctcgcccgccttcctctcccacccgcccctgcgtgctctccggggctccggcttcctcggtctggtgcctggtgcgtattttggaaaatacctggctcataaccacctcattgagctcccagtgtcccagtgggccagcggacacacacgggtagctgacttccctaacgttgtgtccccaaagcctccctggattacagcgcccgctgctccatgtgaccccgcgggagccaggacgcgccccgcctcccggggctgcaagttgcgcagggagcgagcgacgcgcagcagagctgggctccgagccggatgcgccttcctttcctctccagagcaggctgcccgcccgcggaatcccgcacgtagagcaacctcgcagcaccctcagaacagccccgctggggcgcgccgggctgccgcggtgacctttccgacgcccctgaccccgcatccggaggcggccggaagtgtcgccggcctcctcccggcgcagcctccgggcctcccgtgcaatcactacgccctggggcccggaaaccgttttccggtctttcgctttcggctggggcgtggaggccgcggtgctgcgtaggccgggccgggcgcaggaacagccccgtggcgccctctctggccgccgcccgggcgggraacgtygttccggggaccgggcgaccccgcagcggggagcgcgccaggtccgcgcggggaagtgggcggtgtgcggccggcaccgcctcgcaccacgcccccgcgggcccgcactttcccggagtgcaccccgcggccgccagccggggcgatggcggggctctggctggggctcgtgtggcagaagctgctgctgtggggcgcggcgagtgccstttccctggccggcgccagtctggtcctgagcctgctgcagagggtggcgagctacgcgcggaaatggcagcagatgcggcccatccccacggtggcccgcgcctacccactggtgggccacgcgctgctgatgaagccggacgggcgaggtaagggccggcgctcctcctggagcgcaacggggtccgcagccccgttcccaccctccgatcagccaggaacccgctgcttgtggcgctggccgcaggagagaggagcctgtcaccctgtggagaatgcactcccagttctagtcgttgccccttggcacccgccgacactgctagtgccccatcccaaagtgagcattttctttgtgtgtagcacaggatgcggtatttccaaacccctgccctcggtcttttcccacctcaccgctgctcagctctcaaagccctgccgtttcctcctgccttggcttgggaagccttaggaacagaagctccctgggagcacagagcggttttaaactggccaacaccttaacgcccagagccgccctcctctcgctgccactttggaaaataagagactagagattcactggacgcttcctcccggcatcacaagacttgactgctgcttcagttcccgcttgaccttcatactttagccctttaaaggatgttacataataacaattaagagacggcagggccttcaggcagacttctttggagggtgtcaaacgccttgtttattaaagagtgaattttttaattaaaatcatgttttaaaacagagatggacattttattgatggaaaaaaatcacgttaagttagaaagctctcaaaagtacctggtatttacaactccctgtcagggagggcgaactcgatctcagagttttattttcatcagggattacgttgaggtacccagaaatgagaagatttgcccaaaatggcatattttaaaattggcccagaccagaacccagtttcctctgggattatttgttagtaatcgttttacaggctgagcattaastaactccaaagcttgaaggactttttctcattttcacttgttttctctaataaaaataatgctgtaatttcaacttcacaagatgaggcctcatggaagagtgtttaccaaaatattaaaaatactttgacagaaaaaaatcaagcgaactctttgccaaccaaatatcatcatgactgatgtaacaagtaatccaacacagatatgaaaatcamtggtaaaaatcatctcagttaattctaaaagcagagctaaccaccccttttgtcctaaggctttatggtattaaaaaataaactgtacaaaaatatagattttcccctatcccctacccctggaaagtaatatactgaagtctcatcatactgttttggggattccagtaattaaaatctctagtgaayaaagacctgtttcaaaacaacctgtgagctgactggactatttaaagtaattctccttgtagtcactttcagagtgaagacaatgacgaatactgtcttttacaaagggactttttattccaccaacaaattctggattttggcatcaggaaaaccactgttcaatttccaacactatatccaagttgtttgagaaattatttaaaactctttaacttagagggttttctttctcctttacttgttaaagtgactatattacagagtcactttaaggattaaatttattgcatgcaaagtttctagatcactgtctagaagtcagttagagtaagttctttagttgtcaatcaagcatttagtaaggccctgctttgtgcccagtgttgacctcaacaaagttggggatatcagaatattctaagatacagtcgttgttcccaagaatcttgtctttcacatacaagaggtgttgcgtttcattttgcggctaatgtccaaacgctggcctcagccatttcaccttgaagattgcagttggcttccaactggcctctaaactctaatstagcattttccagtccattgtgacaaagtctgccttccccagctactcccagctgttggacctgctgccttagaaccacagattgagacctccctgtcccctctgtcagaccagaccagggcaggcagtatatttgcatgacgcaggatgattgacactggtgatttcacccagctcccttcatagcaattttgacaactgcttcatctgagagacatttggaagcagcatagtttatggtgaagttctggagtctcgctcggtacaagccagtttccaccatttactagctctgtgatactgggcagtcgttagaaagaatgcccgttctgggacatcaaaacctaataattattattctctratagctaacrtgcattatgtgtgtttatttgctgtggcaaatactatgttgaaaaaaactttagacttacagaaaagttgcagtattacaggcagttcacacatgctctctacctggcttcctctaacagtaacatattacagaattagtatattcatcaaaatgagaaaacaaacctttgtccaatactggtcacaactttctcatcttgattgaatttmaaatttgatgtttttccccagaattttttcagcagatcattgagtacacagaggaataccgccacatgccgctgctgaagctctgggtcgggccagtgcccatggtggccctttataatgcagaaaatgtggaggtgggtacatgtgaatatgatcagtattgtactgtgtatctgacagtgtgagaatctcaccagaatcaatataaygtgtccttatatttcagccatttcagcacaaaaaacattccactaagtattttagactatataggtgcaatttaatgctttccaggtatagcccgaatcctggragattaacattctccagatataagtgcacaactgctatcaggtccctttakatttattctttttttgaaaggatatcgttttttagaaacacarataaattattccgcaaggcaagcacttgttatccaccagacgctattttaagacttcaaaaatatatgactaataaaayatgtttccctcaagttgctcagggtctcatatcaatgataaacttagtccaaatttaaaagacaatgcaaatttgatatttatgggataaatattacaaacccatgctrttgaaattagtcctccaaaaagctgtagtctttttacttgttgaaaggtctggggaaatcatcttgtagtatggtgagaaaaggatttgggtcaggaaacaaagatggggtaaacagagcttctcttcatcgaccaaaattaaagactgaatttcctaggaagtagtgccaggacatgtctttctaattatggtgaaaatgttggagtttctcttgcttctccagaatcctggctcagagaagagagcaagaagggcagacaggatttctgccgctgttggcctagtgttaatagaagttggtgtggtggatgcagatggagatctgtccagagtaggggacttgagcaagaagcctggtgggcaccctgtgctcagccctagaccccatccctcctcccacttcacgtggactctgggtgatccgatcacgttcatggcttccattgctgcctctatgctggggacactccgaacaggcatctccagctcaggccttatcttggctgtctcacttgctttcagaccacagcaacctgaaggcctcaaagttaccatcacctgaaaatacacctatgatttccatctccccacatgtgcccaccytccagattcgcctcctcccacctcactgtccccctccccacattaaataactccacttggttcctggtttatggcgggaaccagagaatcatctgggacatctttcttccccccaactccattgagtccccaagactgaatgccagttttatgttcaaaactctaactgaatgtctttgaggcacaggactgaaaatgaacgacggagaaaataaatgttgtgaatgccctaaaaactagctgtattctagccagtattcctataattacaggaaggttgtttgatgtctgtatgtctctaaagtatgtttttctcttcctaaggtaattttaactagttcaaagcaaattgacaaatcctctatgtacaagtttttagaaccatggcttggcctaggacttcttacaaggtatgccagtgtacctttgtaaagctgtctatagaaatggttacttctacgtgcaacttgttatttcaagaattaacacagggtagctttttctgtagcaggactgttctctcagaaaggaggagaaaggctggaaaggaaggtccagctggcagctggcctttgcccgtcaagaggccaagagtccaggtgaacagttatcttcagctgtggtattcaatagcgactgtcgccagtgttcaggaagactcaggaggtcctgatggacgggagtggacgggatggaggacacagtaaagcaaaggagtgtctggagcagggaaatcttgaaaatccaatcaaaaagatggtcagccccagagaagtacagtgagctggtatctagaaacagggctccatcctctgagagagggccccacaagagcaaggcaggagcctagcagggactttggagaactggagaggggagagatcaaggtagaaccatggagtgtgaggatcatctgaggactgaggtattgatggaaggagaaataaatttattattagaaactcggaacttagaaattgagaaaaattcttaaatttttcaattttatgaatgctattttaaacatgtatagaacaatgtccaaaatactcatattttgtaactatagatgaatattttatagatatgtgtatatctttgtcattctgccaaaagcatttgagaacctgtagatgaagctgtttcaggagaattttgttgacttgctrtatttatgctttaatcgttttggatgttacttttctctttctctctctctctctgtagatatattttttgtaaccacatattttatttctagtactggaaacaaatggcgctccaggagaaagatgttaacacccactttccattttaccattctggaagatttcttagatatcatgaatgaacaagcaaatatattggttaagaaacttgaaaaacacattaaccaagaagcwtttaactgctttttttacatcactctttgtgccttagatatcatctgtggtgagtctcatcgatctgtttctaaatttatggcrtaaagagaaaatggcccaaacaggaaatcacactccacygggaaggcaaatggggggacgggaaagggtgacgggctcttcagcgcggttctacgaccgcactggccttctgaggagcagcagccacgcccagggctgtgagtggggcaggcatggagcaactgcccagggaggcgaagggaaggaagaacaggaacagggagtagaagtggaccgtacaagagaagagggtaaagggaggaagaagaattctgaaatatacaaggacaaagcaggatgtacgtctttagtgtctgccgctgcaaaataaacacgagataactaacgtgcgtgaattgaatgnttgcttctcacccatattttatagaaacarctatggggaagaatattggtgctcaaartaatgatgattccgagtatgtccgtgcagtttataggtaaatggagtcctttcagttattttaacaattattattgatttaggctttaaaaattattgctaacaatttctgcgttgtatctttttatggtttcaaaattaaacattaaactagaagttaacctcatcatgtaagcatgtgtttaagcagtaaaggttatgtaaattatggcacatctagattatgtagtaatttaaaatgattattctctaacattgagattacattatattgtacataatgatgcttacattatgatgctgagaaaagaaagatataaacagttttctgtaccatgataattgttatatttaaaaattattcatagaaaaaaactagcagatattataacagaatgttagcagtgtttctcattgtctcgtgtatgtgtttctcattcttgtgctttccttttgttgttattcttcttcccatattttctgcaccaagtaggtattgttttagtcawcgaaacagtcaattttactctaaaattgcttgcaattattcacctgttaaaaggcagggcaaggacttgatgaagtacagagaagtgcattgagctgagtatatttaagtctcctgctcatttcacttcattttaaccaatatttattaggcatctgtgattttccaatcactgcacagggtactgactggttttgtagtagtacacaaaacagaataacacaggaggcaggcaacggacaaagaaattcatgaactgtaataattgctcaggaagaaaagatcaaattgataccagagagcaaaacaagaaagtgtcctacagagtgagaggccaggaaaggtctttctgaagaaccggcacctaagctggtcctgcaggagatcacataggggtctttctgctctatggctggacatgaaagggaggtgctgggacagccaagtgacagatgggtacttagagagccctcgcttgtagaagagggcagccagttgtcttctgtcactccagaggagtggtcagaccaatgatggaccttaaaaagaggccgatttcatctcaaaccctggtgcagaggtcctaggcagagtgggaaacttgccctggagaagcagaagcagagaccaaatggctatctagtaaggatgttttataatgaatccttcattcctttaaagagcccattattttctgaggcttcatgggatgcgtaatagcccatgccttcactgctaagcataaaacatggagctcttagtagcctctaagacaatcatcgtcattcccacgattgccttcatcaaggccaggtactaaagaagtgctcaagaaatacacatttctgatacaacagctgatgtatttttatcccatttatagaatgagtgagatgatatttcgaagaataaagatgccctggctttggcttgatctctggtaccttatgtttaaagaaggatgggaacacaaaaagagccttmagatcctacatacttttaccaacagtgtaagtccctgacttttacaattgtggtaaaatagacataacataaaatttccctttataaccattttaactgtacagtttggtggtattaagtgcattcacgatgttgtgcaaccatccccaycgttcatttccagaayttttggtaagtccatgatgttgatgttttgttaacatacccggtgtaggactatggagcctatgtctcagaaaataaaacttgaataataatagaaaacaatttttcatataaaaaattatacttaagtataaaaatgtatacttcaattatgtagtcaacaaatattaattaagtactcgctaagtgctaaccaccatactaaatgttggaaatgtagtaatgagtaggacatgtgtatatggtccrtacctgaaaggaagttattctagtaggagaggtgatctatcaacacataattacaacatgtgatatgagctrtgaacacttatgaacaaacagggtgctgtgtaaaagaataaaggaacaaagatctrtgtataggagttttctggaaaatgtttggattcggcagtcattttcaaaggcagagggcattgatagcagtatcttaacatggaaaacattaaaactaactagatattagtattcyatttccaattcaaaaataaccagaagatagtgatgttgttttgaatataggatgtcaatctttgtgttaataatgtgttttgaaaaagcaagacttaattgaaaatatacatcaaattataatttcagtgtattaaaaaactgcctgtttaaatatgtcctttctttgctgtaaattttggttaaaatctattggagttaygtccttgtggtgaagtacaccctacccccaagagagcaaatgatgaataaatcagwwgatgttccatgaatgcaatgttggctgagctggccacagtggagtgtgatcacctggttataggagaatagccagcaggttatatttcataattatatttttccttaaattttgtgcattaatatttaatagcaataattaaatgaattccagactgaatagacaattttattcattgaataaacattgagaattgcctactgaggcctgggctctaggaattccaccaagaataaaaaaagacatggtgttttgccctcaaattgcttagaatctattcaggccacttagtagcaggtttggtcaattacctggtaggaaaagaaggttgaaatgtacaaccaaattaagtgtattggccttcattcttttatccatccaagaaatatctagtgagtatttgttaaatgccaagcagtgctctagaggttggaaatgtatcaatgaacaaagacatgcacaagcatggcagtgtttgagttgtaagagaaagatgctaaataataagtataacgtaagtataatatcacattataataataagtatgacagaagtatcacataatgtcaggtggcaagggaaatggagaaaaagcattgttaggaggcgtcgcagtgctagggacaggggtagcagggatgagggaggtctctctgatcgtgtgacaatgagcagagatctggaagaagggagggggcagccgtgcaggcctctgaggaaagcatttcaggcagcagaaatcgcaagcatagagggtgaattcactaatctgcttgctgtttcttttctcctctacaacatgtaattaagtctataattagactgttgtataatgattgcattcactctaccacttaaactttttctcattagcgcaatcaaatctctagggtactatctagtagactatgattctattcttgtgttggaargactgcaaaaatagcacttgaaaattaggaatttgcgtgacattaaatttgtttttaaaagtttcaccagataatccccaaaatattaatgaggctttactgtattttcacaagagcctatgttgtcgaaatgttgaaataggyttagaaaaataaatgaaagaaactagcatattttataagaaaatgtgttaactagggtgcatccaagtccaaacagaagcatgtgattatcattcaaatnatacaggtcatcgckgaacgggccaatraaatgaacgccaatgaagactgyagaggtgatggcaggggctctgccccctccaaaaataaacgcagggcctttcttgacttgcttttaagtgtgactgatgacgaagggaacaggctaagtcatgaagatattcgagaagaagttgacaccttcatgtttgaggtattgtatattgttaggttcagatatcattaaacaaatttcagttattgttagaatctttagcrttattttttaaaacaatcaaattttaaagtagtttaactaaagaagattcattatattttaattagaaattacaaaatttaagaaactgattaagtaccagctcaacttcttcagaaaacgattttgactagtgctgggcacagcagtagacacatttgtttttcctcaagaaaacctaagatttgtcagagttttcccaagcagaagagcagccagagattgctctcagttctccatgtggcttcaggcttccttctaacctcccagacatgcaagtccacttcctcaccacctgctttctgaggttccagcagatgagcacttagctgctgccatgagctgctctacctagaggacagttaagagccctccaacagagaatcagccagttcatgattctaaaaagatctctgatctcaaatttatacatacatatgtgaagtacattttagcaagatagcctaaatattaaatcctacaaagagggactttctctatatgtggattgcaaaataaataaaacatggtttttagaagccatgtagtaatatcgtccacatggggcagagtgaaaggcacctgagtttttaatggctctgcctgccacccacgtgtgagctgctctgyggcagcctctggcggcagtgccagtgtcctgcactctggtgtgaggctccacgacacggtagaagaaggttgtgtgatgggtctttcgatccgagttccagttcaggctctgtgctgattagccaaataagatagttctgatcattccagagttctgtcacaattttcctatgtgtaaagcgagagatggactacgttggtggttttaaacttttttaagcagaaaactttactgaaaataaatcttaagcagaaaatggacatctaaattagctgaaaagtagagaggtgttaagtgtgtgggctctaagatcaaatcccagctaacatgctgggaccatgacctcaagcacctcacctagccgttctgggcctgaatattcttattttaakagcacaagcctcatggaatagttatgatgattagatttgtaaaggtgctctgagaatcgtgattggcccataagtatgcggcacataccgggtgttattattgcatgtcggagtagagagatctcacatcttcaccttgcccatgtactacacacacacacgcatacactcatgtaaacccatgcacacacatgcacacacctacacacacacatatgctcatgcacatacacatgcacagacacatgtatataccaacatacacacattcacatatacacacatacacaaacacatgcacacacctacatacactcatgcacatacatgcacacacaaacatgtatatccacatgygcacacacgtgcatacactcacacacaaatatacacacacacccagatactcatgcacatacacacacatgcacacatatacccacatgcacacatgcatgcatacacatgcatgcacacatatacccacatgcacacatgcatgcatacacatacatgcacacaccaccccccacagaggcacacattcatgtacatttatgcaatcatacaaaaacacatgtacacacctacatacacacatgcgcatatacacatacatagatgcacatatatacacacatgcacacataaatgcacacagctatgtacactcgtgtacataagcacaaaggcacacacaaatacatgtacatatccacgtacacacattcatatatgtgcacaaccccatacacatatgtacacacatgtgcacacacacatccatctcctaccaggaacctctcaatctcacgtaaacaatcagaaccagactaatgatttttcttccaactctaacattccttgacattctmattgttttcttctttgcattgaaagggaggcagcataccaggtgtgagtgtgatactgtggcctcctccacaggtcggtgcaggctgtgagtgacactgtggcctcctccacaggccggtgcaggctgtgagtgtgatactgtggcctcctccacaggctggtgcaggctgcaactgcccaggttccagctgtgagctaaaagtgggcgtcctcccctgctccaccagtgtgcctcggtgctttacgtttgccttatcatgctttctgcagttggcagatgaaatgaaatcggaagttcagcagactcctcttatgcatttggatcaggcttccgctcataaattcaaggaaagctattaaaattgtttagccagaatacttccttccgtacttagacaactgagcacaacgggccggagctcatctggagttccgagtaggttttgtaactgcaagtgctaggaaaatgcagaggcgccgacctcaggacctgtaggctgtgtcttttaagaattgcagaataagccccgagcaattcattttaggagctgttttataaaacaagtactttgaagatttctgcacagagaatgaaatattacaaaaatcacttgtgccacataggaaaaatggaaaagtgagatcttttatagaggaaataatttgttttttctttttgtcctcaaagtttcagagaggtagattactgttattgactttccagatacattttttttttctgaagaactcaccacttttgcatatggaaatgtgctagggagatgaggaggtagataagaagccaggtcctgaaatatcaaatgggtgggaaagaaggttgcccgagacattacactagcttaagaggtggaggcggagacgttacgctaccgctaagaggtggaggtggagacgttacgctggcgtaagacgtggcggtggagacgctacgctggcgtaagaggtggcggtggagacgctacgctggcgtaagaggtggcggtggagacgctacgctggcgtaagaggtggcggtggagacgctacgctggcgtaagaggtggcggtggagacgctacgctggcgtaagaggtggcggtggagacgttacgctggcgtaagaggtggcggtggagacgttacgctggcgtaagaggtggaggtggagacgttacgctggcgtaagaggtggaggtggagacgtttcgctggcgtaagaggtggaggtggagacgttacgctggcgtaagaggtggaggtggagcgtccttactgcacagggtgtggagggaatggcgtgggctcagctggctttgtcatcggacacgccgcaggctcagtttctgcctctgtttcccactaagctgtttagcacagaagaagttatttaaccacatctttggcctcagtttttaatctctgaattgtaaagaacagtaatgagtctttcatggagtttttgtgcagattaattcagtttctgcaaagtgcttagtattttgcctaaaactcagcaagtatgaaatgaggttgttgtcaatttttactgcagaggatatgacttagaaccacacctctaccccctggtgcccgtcatcaacaggtgaggcccacctgacagatgggggaaggcagagaagtacagccctgacaagcaggctcgtgaaaatcagactttgttctgttcacaaaggcgcagctcacctcgtgcccatggaacgccgcctttattaacacagcacaggcacgtcccaccagcgtgcaacaccgtgcggcgtggaactgccatctctaggcatgaacctccgctttgcaggcttgtttccttgtttgtcaccgaggcaaggtgctgcacagaattcatttcttatgtttgcagtcacagtgcagtcatcaaatccagagacaattcaaaagaggtttctggtcactcctaatcatcgcagcataactctgctttttaagctattgttttctgcatttgtaggggcacgatacaactgcagctgcaataaactggtccttatacctgttgggttctaacccagaagtccagaaaaaagtggatcatgaattggatgaygtgtttggtatgtttggccccttcactggttatattgtggtactaagtctgctgcagagatgtcactgtgttgtaaacacagtgtaatgagcaggaaggctccccacgggatcctttccagtaccatcccctttgcaaggcctcgtccattcactcacaggcctctgccagtcgcctggcaagtgactgtactaggccggatgctggggtgcactgatgcgtgctgctgtcctcaagggtctcactgctacccaggcgaaacagaggctttgagtcatgggtcgtgcatttgagtgaagaaggtgctatttgggagaaaggaggagctggtgaaactatttagaaaggtacaggaaagctgtttcgcagattgcctctcaccacaaaggagagaaaatgtggattamaaaggtggattaagcttcgaggagatacatttctattacacagcaagcagcccggaggaaaagtcctgccagtaggatgtccagggtcccagacttgcccttttgctcccagccatccctaccatcttggcttttgtcctcatgattgacgttccaagcatcacgttcatcttcaaggcaggaagacaggggaggtgggggtaccgggtgtgttggtgtcctgtggctgctgctgtgacaaatccacagacagggaggttcacagcagcgacgtctgttccctcacagttctggacacccgagtcaaagatcagtgtcattgagcccacatcaccatgtgggcagggctgtggcccactgggaaaatatccactccttgtctcttcagcttccggtggctgccagcatttcttggctgacagccgcatcactgctatctctgccagtctctgcatcgccttctcttttctctgggtgtgagtgtgtgcacgcacgtgcatgcatgtgtggtgtgtgtgtgtgtgcatgtgtgtgcttgtgtgtctttcacaagcatacttgtgacatacttgtgatggcgttcagggctcacctggataatctacccactgtaagatctttaatttaatcaaatctgccaagagttctcttcttccaaatagggtaacatttacagattgcagggattaagacctgatattttggggcccattatcagtctgccacaaagaggcttccatagattttatccttgttaaaaatcacgtgtcatatggcccccaatagctgcaaggtgaaaaggaataaagttgagttagccaagcaacaagtggtatctgatgcagttttacagtgagaagcagggaaagaaaactaaaggaataaagctggagagagaaggcattctagaaagagaggaagcagatgagcaacggcacagaagtggaaaggtttctggcrtggagggcaatagtggagagtgagagaccgcgagaactcatctctcattcactgggagatgaggatggaaaagcagttttgtgtgcagattgtgctgggactggaatttcatattaagaggcaagcttttattttgcagaatggacaccatctaacacttttggcaacatttttgtcatcattttatctttttaacactgattttagttttgcttagattgccttgagtggataaatttggtcttccaaaagctcacaagttcttttggaataggcttcaatcttttgtatcccctacaaagtttagctcattaccagtttcacaaagctttgtggtcctgcagaatgagtgacacagtcatcattactagaagctttgctctgtgattcttgtgttttctgctcattgtgcctcactttttcttctacccccaatcctagttctagaatttttgagcaactaagctgggctcggtggctcacgcctgtaatcccagcactttgggaggccgaggtgggcggatcacgaggtcaggagatcgagaccatcctggctaacacagtgaaaccctgtctctattaaaaatacaaaaaaattagccgggcatggtggcaggtgcctgtagtcccagctactcgggaggctgaggcaggagaatggcatgaacccctcggggggcggagcttacagtgagcagagattgcaccactgcattccagcctgggcagcagagcgagactctgtctccaaaaaaaaaaaaaaaaagaaagaaagaaagaaaaaaacatttgagcaactattctttgtgtagtgagttattactttgcattattaattaataattaattattaaattatatttatattaaaaattatataatatataaaatatattaaaatatataaaaatattaaataattaataatactttgcaagtattaattccttaaatgttatttttttttttactgaggtaaatgtcacataacataaaatctaccattttaaaatgtacatttcagcagcatttagtaccttcaccatgttgtacgatagttatgtctacctaattccggaacattttcagcacctcgaaaggaaacctggtaggattaagcagtccctcttgattcctccttcccctggccctggaagcctgtgatttactttctgtctctctggatttacctattccgagtacttcctatatatggattcgtacaatatgtgacctttagtgtctgtttattttacttggcacattgtccattttattttgataatgcataatgttagaaattctgctttagctgtggctatttagcatcccctgccttgatccacatgttcttctttgatgggtatttagcatcccctgccttgatccacgtgttcttctttgaagggtatttgatggatatttagcatccagtaccttgatccacgtgttcttctttgaagggtatttgatgggtatttagcatccagtaccttgatccacgtgttcttctttgatgggtatttagcatcccctgccttgatccacatgttcttctttgaagggtatttgatgcgtatttgatgggtatttagcatcccctgccttgatccacgtgttcttctttgaagggtatttgatgggtatttagcatccagtaccttgatccacgtgttcttctttgaagggtatttgatgggtatttagcatccagtaccttgatccaagtgttcttctttgatgggcatttgatgggtatttagcatcccctgccttgatccacatgttcttctttgaagggtatttgatgcgtatttagcatctagtaccttgatccacgtgttcttctttgatgggtatttgatgggtatttagcatccagtaccttgatccacatgttcttctttgaagggtatttgatgggtatttagcatcccctgccttgrtccacgtgkttttctttgaagggtatttgatgggtatttagcrtccagtaccttgatccacatgttcttctttgatgggcatttgatgggtatttagcatcccctgccttgatccacgtgttcttctttgttggrtatttgatgggtatttagcatgccatgccttgatccacctgttctttttagatgtctgcacccccagcccccactgctctttcaggtcrtcttatcwacttgctttcawcagggaagtctgaccgtcccgctacartagaagacctgaagaaacttcggtatctggaatgtgttattaaggagacccttcgcctttttccttctgttcctttatttgcccgtagtgttagtsaagattgtgaagtgggtaagtatgctatacctaaagtagaagggagagggaaactttctnatgtctaccttgctccggtctcataatgtattgactacttcttgacagcaggttacagagttctaaaaggcactgaagccgtcatcattccctatgcattgcacagagatccgagatacttccccaaccccgaggagttccagcctgagcggttcttcccsgagaatgcacaagggcgccatccatatgcctacgtgcccttctctgctggccccaggaactgtataggtttgtatccatctgaawtggtttgacctttcaggcccacttgatggtgggtttctcacagtgatttctttgagatgtgatgtgacattgcccatatgcaacagccttaaaaaaaaaataggtggtttcttttttccctcactgtgctttgtagttttaaaatattacggtcaaaaggtatattagtatattcgcctgcatggkcttccatagcaaaataccacagactgggtggcttaaacagcagaaatttattttctcacagttctggaggctggaagttcaagaacaaggtgttggcagggctggtttctcctgaggcctctctccgtggcttgtagatgccattttctccttatgtcttcacttggtctttcctctgtgtgggtctgtgtcctgatcttctctccagtcagactacactagggcctaccccaatgacctcacttatacttactgacctctttcgattacctgtctccaaatacagtcatattctaaggtatggggggggcttagaatttggagagagacacaattacccataacataaaacataattagcttcatggtagagtttcaaaatgttgtagagttttaattacagtagaatataacttattgtggtaaaaactttattaatgattacttatggttaacctaatttttgtgtttattgcttttaagaatttcattttgcaaatcaaaacagcaaatgcttgccatatggccagctagtacttaagcaaaatgaatgcacatcaccaccctgcattataaacccttttggttttagtatctctagcattttgtcatttatgtaaatgcagacatcggtaaaatgaggccagartgaaacgggtgaatctgaagcttttttggtgaatccatagtaaatgaaagacccactaagacataatctagggtagtgagtctcaagcttgaaggagctcaggayttatctggatcagctggagtacaaattctctgatcctccccagctatagatgtgcaaggtgggatcagggagggaaactcaagactcttcatctttaacaggtgttccaagccattctgrttctccttccacctactgcgaaaatgtaaagtggctcgcttcctatgacaggacctcttgtttctcacatttggggtaaatctataactaaagcgatggtatctacattaatttgaaggtcaaaagtttgctgtgatggaagaaaagaccattctttcrtgcatcctgaggcacttttggatagaatccaaccagaaaagagaagagcttggtctagaaggacagttgattcttcgtccaagtaatggcatctggatcaagttgaagaggagaaatgcagatgaacgctaactatattattgggttgtgcctttatcatgagaaaggtctttattttaagagatccttgtcatttacaatttacagatcatgagttcaatatgcttgaatcccctagacctaatttttccttgatcccactgatcttgacatcaagtctaacaaagaaaaagttttgagttttgtattttcttttttcttttttctttattttttttttttgaaaccgtgtctcactctgtcgcccaggctggaggagtgcagtggtgtgatctcagctcactgcaacctccacctcccaggttcaagcaattcttctgcctcagcctcccaagtagctgggattacaggtgcctgccaccatgcctggctaatgtttttgtatttttagtagaaacagggtgtcaccatgttggccagactggtctcaaactcctgacctcaagtgatccacctgcctcagcctcccaaagtgctgggattatagtcgtgagccaccacgcctggccagagttttttatttttatcaccaccatagatgttacagttggctgtggtcacaaaagtagttaattgtgtcagcacccaaataaacatctaacaggtttctcaacagaggaatccacagtccaattccacttcaattgatagacccaaaaaatataatttaatcaaagttctagagtttttgtttgtttgtttgagatggagtcttgctctgtcgcccaggctggaatgcagtggtgacatcttggctcactgcaacctccacctcccaggttcaagtgattctcctgcctcagcctcctgagtagctgggactacaggcgcctgccaccacgcccagctaatttttgtatttttagtagagatggggtttcaccatgttggccaggatggtcttgatctcttgacctcgtgatctgcctgcctcggcctcccaaagtgctggcattacaggcatgagccaccatgcctggcccaaagttctagaattttttaaaggtattcatggtgactcaggaatwcacacatacacacacacacacacacacacacacacacacacacatacacacacacatataatttgaaagaggtgagtatgtactctgacttcagctctcaggttttaaaaattatattagtgggaccagttatgacaagaataatcattatagtacttttcagattttataacctggagcagattattttaagttgattagtaggttctgttacagtttttcttttgwtcgtgcacttatagtcttcatttaattcctcatagaatcccagtcacctttatatatcatattattggaagagattcatcttcataatctccagttttttcacagtgcctcacagagttaatcatgccttttggagctagaaggactttagaacttatctagttatgctcctttatattataagtaagggaatagaatcaataagacagtttctgcccaaagtcatgttaccagttggtgacagagctggaaatacgtagagatctatacccttaaatctctccactcacatgctgatatactttctactacaatatgctatagctttatggaactcagggtgatgatcagacgtgtcattagaacatgagtcctctgcttctgattcaggcatacttttgggattcttccatctttaaaggaaaaaggaagccattcatctatatttagtaacccagtaatatctcacttagtttagggttagatctttagttaattcaaccttatagatcatacttatgaaggtgataactgacacgtgttccctgaattttaatttgataggcaatacatctacccactccattattttttaaaacttcatttaatagtttaaacaagattggttttgttttcaatttttattcactcttcatagaatcacaattacctttatatatcatatgttattggaagagattcctcagtaatctccaatctctcatagtgcctcacagggttggtcaatggcttttggaactggaaggaccttagaacttatctgttatgctcctgatagccaatagcagatagaagcttgcaatcaagagggtaggacatgtgttcttcaatggatatcaaaggaagaggttgcaaaccaaagccatttggcaagccctgtagcctgggccatttaagacaggggcggtctcagccaaattgcacccatttaactatcccaaagagccacagtgcctacaacccaggccctaagttgatgaagaaaaagtcaaggaaggaggtgatacaattggaaatattcccatcaaatggttaatcttatttagaaaatgggcatattagaaaaagtccttccaagatgattttggataataaaagttgtatttgtggaaattggtattatctctgttttatgcacttacatttatcccttacattttgtttttagtgaccctacatgacattaaatttaaagtaaaacattgtttaatgttaccttttggcttgagaatgtctttcagctccagaattattgttactcatattttaatcagtaagtcatttaagctatgacagagtaggaattgagaaattatttcatatgctacagtattgaaatgtggatgctgccttgttttataagaagatgatcaaggtttgtgtgcccattacctttcctctgcctgaaagacgtgtctcaagaaaaataaattctattttagatgcaggtactgcattttattctaagaattgatatcaattcaaaacatagaaaactgtaaaagataaatcaggagatggctgattcataatgggtaataaaataaatagcactttcgagctgatgtcgtcagtgactcttggattttctaacaaaaggttcctttactgttgtcatagagagaytgtgaatttctctgactctgaagaatcaactagaagaagtagaatcaccagaacattttgctcagctgaaagcacaaagtaaactcagttactgggaatcagcaaaaaccacaggcatcactggtcccagggatttagagtccagaaacctctccaggtgatggactgttgatttggggctctatgcattgtcacagacagctggggatatcagtttctggaccaaatgacccaataagagatgctggtcgtaaaaatccatttttatctggaatgtttctagaagatcaaaacctttttccttccagcatctaatgcctgagtgatacatttaaaaatttttagtctgcgtgggcaccctctttttctaggagcagcactttttatttttgaaattatcctacaatgaattaccggcttttcttctgttctcatctttttccttccccagcatacacacactgtaaatatgtgccatgttcttaggcaatcccactttctcaacctttgttgagtgacccaagcaaggttaaattcgagttctccccaacgagttttcccagctgcaattgaagaagagatacagtccatctctgtggtggaaactccaggttgtgaaactcaagatcaatcagcaatagaacctctggagcagctgctgggtgatgagaagaagcaggcagaagaaatggacagaatcctggaggaacctgagtcccacatggcaggtgatgctgaggctcactgcatgtctgccctgctcactcttcagtgggtccaccctacttgggaacccaagagccagtatattgccgtttgcttaaaaggactgtctttcatttatgaccaaaagcgagttagtgtgtgtcaggtcagcygaaggatgaaggaagggcccccattctctggatatgatcttaggtcttcaccctattttctttgtgctgttcaataattctctgtattggatcatcagcatatatgcccaccagtcctttaaatgcaataccatttaagaaaatgcagagttttctcttttctagatagtaggaaagttaaagttacactgcattgttttagaagacagctaggcttaacctaacacatcagtctagttttttggttctgccatgatgactttctggactaattagtcatttttctcctctaattaaaccaggttcattttcctgctggctagctgtatgccacatttcagggataaatctctcatctctaattactaaaatggactcgttgcatccttgcctcagtttcttgtccagaagttcaccaaatggttatttccttgggctgaattcagttttggaattaactccagcatttagctgttgatcttgttctctttatcctagtagataagtttttggcacgttctttctccttcccatcattatctctcctctttacccgtcactttctttctgytgtggtttgcatttrttgatctctgcctttcctgatactactcaatttatgtttcacagaaataacggctgtacttaaatgaaactcagattcctatataaaaatgttgggataactttgttccttcagtaagggtcatacagacattatagatcttatcgggaagaaaaattatcacagtatttagacatgactgtcttattttaaaaatgttttcagtttactttcagattccatatatagttttaaaatacatgttttagctgaatagtaaaaaaaaaaaaaaatgtgtaggcacaggagtatctattgggctctcctgggaaggagagtagcctttctttctctttctttctctttctttctctttctttccttctttctttccttccttccttccttctttccttgctttcttctttctttccttgctttctctctctctctccttgcttgcttgctttcctttttttttttctatattctacctctaggctttgcgtccttgcttgcgcaagtcaagcccaagttttaagttttatgcttatggaaatacagtaaattaagacatttatttatttatttatttatttatctatctatctattttttgagacagggtcacctaggccggagtgcagtggcgcaattgtggctcactgcaaccttcacctactgcgctcaagggatcatcccacctcagtctgctgagtagctaggactacaggtgcatgccaccgtgcctggctaatttttgtaatttttcttgtacagttggggtttggccatgtttcccaggctaaattaagacatttaaatcactcaggcacaactaattttttcatattgccacatcttcctaggagtgggattgtgcttcagttttttcagctgtctatgccttaattttgactcccatcaataatgcttgatgttgtagccagtgttggtttattattaccaaaagcaatgctgttctggaaaggcaaggactgcagtgtctcatatgatgcaattggacggaacctcaagacgacatttgctcccagcaaagggcattcagcagaacaaggaccaatcagaattcatccaacaatcattttcagtgtcatctaagactggcaggtaatagcttacatgtgcgattgtgactttcatgtgaggatgagatggtccacaactgcggggaaagcaaccttcctgtcctcaatctcttgtttttaaaagatatttcattccttattcatgtgcttatttatttatcgttttactctttcattcataaaagtctgccaagttctattgagggagctggggaaagacagcaagcaagccccaatcctaccagcaaggtgttacagacagtgggcgtctgaaaaacaacagagaaatggacaaggaggtaacagaatggcagggagtgagaagcgttacgcagaaagacaaagaatggtgaagagacaggaggtggaagagatggaaggtgccttttcagatgagatgcttgctggaggatggtatcctgaggagatgatgtttgagcagtggtctgattgaagtgagtcacgtggggatctgggacaaggggaggtggagagggctccatcctggcacgtgtctaaggggaggttctggagaaaaatcctctttcaagcacgtgcagtttgttggaatattcagtgctttgggatggtaggggtgaaatccccatgttctttttggctcttgtccagagatgactctcaggtccttccccgtgacccatctcaaagccagcgctggagcacttccctgctgtcaatccctcttaacgctctgaatctctctgacatctccttatgctgaccgcagaggaaaactctgcttttaatgggctcatgtaataagatttggcccactctgattgactccattttgattggcacaaagccaagtgtttagtaatcttaaccccatctgcagaattgcttttctcatgtaacataatcatgggcagatgtgatatctcgttttattcactgtccccaggatttgagtgggagatttgggagaatgttttagaattctacttaccacgcctcttttcaatttagttctgatttggttcacctgaatctacagaggtttttttagttttattgtgctactagaatgtaacatgtttcactgtaagaaaactccaactaaacctagaagcatatttaaataggttaaaagtctgtaatctcaccttttagaaaaacaaaccctgagggtttctgctgtgatgtgaaggcagggtgcttttgtcccagttgttttgttgttgttgttgttgttgttgttttctgctgagcctggtagctgatgaaatctaaaatataaactcttttctactgcacaaagtggagagatttgttgactactgctgcaccacttgatatcctaaaagacagcacaacatgcatatttaaaatatgctacttccttctcaccagaaaatattttattggcaacattatcctacatttctaataaatgtagttctgcattccagtaatatacataaaatatttatttaagaatcgactccaaaaactctaatgtactaatcaagatgatatactgtaatttcaaagaatagaaaacaaaggagatttagtgggcaggtcattgtggtctttaaatattttaaaagcagaaaaaggagaatcagttgttttgtgtgggtctagtacgtaaatctaggactgaaggatagaagtttgcaaggaggtgtatttcagtatacaggaagtttttttcttttcttaaaaataaaattaaaatagagctccctgagctctgaaataaaataaaattaaaatagagctccctgagttggagcaggctgcttaggaaaccagtttctcctcagtcgaagtattttgacaggaaggtctaaagtctatgtcagaagtgttatccagcagatttcagccaaccttatctgtagagtcagatagtaaatcttcttggcttttgaggccatgctgcctctgtagcaacttcttaactctgccattgtaaggtgaaagcaggcatagacagcaagtgaatgaatggccatggctgtgtttcaataaaactttatttacaaaaacaggtgcaaagccaaatgtggtctgtgaactgtggtttgtcaagcctgatatattgcatttcctgaattgggtgggaataggacctaaacatcaagccagtcccttccaaatctaagatttcagtgttatatgattctttggtagggtgtaggaaggcatagatatcatttgctaaaatatccctctaggaggagctatccatacccatccattattcactgtgcctgcaagcaactctaataaaaaaaagttctgttagatgaggtttcaactacatgccactaaatactgggaatgttataagcattttttaaaatggaaacctgtgcataaactgtgtgaccctaaaatgaaattagggtccttttgagtgcagcatttttctacctttttttatgtatcatttacaaataaaaattatatatatctactgtgtacaagatagtgttttgatatacatgtacattgtgaaatgattaccatagtcaagctaattaacatgtccattattttacatagtgtgtgtgtgtgtgtgtgtgtgtgcatgtgtgtgtgctgagaacccatcagatctattctctagtgaagttcatgtatacgatacagtattatgaactatagtcaccatgtttgcattagtcagggttctctagaaggacagaactaataggatagatgtacatataaaggggagtttattaaagagtattgactcacacgatcacaaggtgaagtcccacaatagtctgcctgcaggctgaggagcaaggaagccagtctaagtcccaaaacctcaaaagcaagaaagtcaacagtgcagccttcagtctgtggtcaaaggtccaagagcccttggcaaaccactggtgtaactccaagagtccaaaagctgaagaacttggagtacaatgttcaagggcaggaaacatccagcacaggagaaagatgagggccagaagacttagccagtctagtccttccacgttcctctgcctgcttttatcctagcccggctggcagctgagatggtgcccacccagattgagggtgggtctgcctctcccagtcaactgactcaaatattaatctcctttggcaacaccctcacagacacatccaggaacaatacttggcatccttcaatccagtcaagccgacactcaatattaaccatcacaagtccaccccttgtctacttgaacccatacgcatctcctgaaatcatatataatcttcaaataaagataataataaggtcataattatgttaggtaatacataatacagctatccttcgtacaaccagaagtgtaccaatccccaacccaaatgctgttacataaagttaacaacatttaaatgctgatttgaagtaaataaatcttatgtcacatgataaaggaaaaagaaaggaaataaaatgaagatattttcttagtacaagtgtatacatacacaaacatgttcctaacaaaataaggaggaaatatgacaattacagtcctcatttctgcagctggtcacgtgggcatagccggtattgatgactaccttcttctactacccattctgtattccttttgccttcagcaagcatctcagcaggttgtggttttttacctggtggagtgacccaaacattcattcctaaggggtctgggccttatgtagcactgcctggattgggctgttgtagtttcccattgaccttaatcacagggcatggtaatactaagagttgcctgaagggatctcctgtattccttgcatactcttccttacctccactgtggagtaatagactaacttcatcttgatagtccaggtcaatcaccacagccaacactgcaactcccttctgagcctgttgacttagaggtaaaaggatctcaaagtgtccaggtggcaagcttaacttccagtttaatggaatccttgttgtgtcttctggtggcagcatttttccctctgaaactaacacaactaagcaagcagaaggtaatgtattgggaacaggaagcaaaaattttgctagtggatagctaggggtgatggtgagtggtgccacttccacttctgccccttgattcctagacctgtgaatcctggctatgggagaaacggtgccatatattggatgttgattcagagcatacatagccttctggagaattttgccccagccctgcaaagtattgtcccctagttggcattgtaattgtgacttcaaaaggccattccaccgttctatcaatacagctgcttcaggatgacgggaaacaatgttgtacattagatcctccaacttattcacactgcataattggaactttggaccttttgaccaaaaccaccccatagctggcactccccatactctggctaccaccattctactctctgttagcatgactttgacttttttagattctgcatgtagttgtaagtgcctctcttcagatgatcatatgatttttatccttcattttgtgaatgtggtatatagcatttattgagttgcatatgttgaaccatccttgcatcctaggctcagttgatcatgatccttttaatgtgttgttgaatttagtctggctaatattttcttcaggatttctggatctatgttcatcaggaatattgatctataattttaattttattttattgtgatgtccttgtttggctctgctatcaaagtaatgctggcctcattaaatgagattggaagtgtttcctccttttcaattatttgaaagagtttgagaaggattggtgttaattctttaaatgtttatagacttcaccaatgaagacatcaggtgctgagcttttcttagttgagagtttttatttctgattcaacctccttactcattattggtttgttcagattttctatttcttcctgattcagtcttggtaggttgtatgttcctaggaatttatctatttcttctacattatttaattagttgatgtactgtttttcatagtagtctcatgattttctgtatttctgtggtatccattgtaatctttcctccttcatttataattttatttgagttttttttctttttctcctaattaggctaaagatttcttgatttatctttttaaaaacaataacagtgtcattgaccttttctgttgtttttctagtctctatttcatttatctctgctctgatctttattattttctttcttcctctgtctttgggcttagttttttttttttactttcttattgcttcaggtgtaaagttaggatatttcagatctttccattttcttaaggtaggtatttatcgctataaacttccttcttagaactgcttttgctgcatcccataaattttcaatgccacaaattttgtttctcttttcatttttctcaagacattttttgattttccttttgatttcttctttgactcattggttgttcaggagtatgttaattttcatgtatttgtgaattttccatttttccttctgttactgagttctacttttatgccattatggttggaaaagatacttgatatgatttcaatccttaaatttgttaagatgttttccatggcctaacatataacctatcctggagagtgttctgtgtgcacttaaaaagaatgtgcattctgctgcttttgaaaggaatgttctgcacatgtccgttaggtctattggtttatagcattttgaaatccacagtttccttgttgattttctgtccaggtgatctattcattgttgaaagcatgttgctatttatttctcctttagttatgttaatatttgctttatagatttagatgcactgattttgggtacatgtgtatttacaattgttatatcctcttaatgaattcacccttttaccattatataatgaccttctctgtctcttgtgacagtatttgacttaaactctatctcatctgttataaggatagccacctctgctttcgtttggttatcatgtgaatgcaatctctttttcatcccttcacttccagcttatgtctgtccttaaagctaaagttagtctcttacaggcagcatatagttagatcttgttttttattcactcatccactctctcttttgattggataatttaatacatttacatctaaagtaattattggtaggtaaaggcttactactatcatgttgttaattgttttctgattgttttgtagttcctttgttgcttctttttgtctcactgtcttcctttgtgacttaataacttttttggagcaatttgctttggttcctttctctttatgttttgtatatctactacagactttttctttgtggttatcatgaggtttacataaaatatttcatagttataaccatccattttaatctggtaacaactttgactgcatttaaaaatactgtattttaa

SEQ ID NO: 93963 - DNA, 18906 bp, Homo sapiens
attgttatgtttccaggacttttgccagcctcttgctaaccacagccattcctaaaaattaaattacatttttaaaattaaagaaattatgttaaaaagaaaggtaatattaaaaacttatcactttctaattgttttactctattttatgattttctgtgctctcaagtttattgatgtctattctatctgtattgtggaaatactgcataatggtatgctattctcacatctcttcctaactccacattcagtaaaatcatgttggaagctcaaaatcaaccagggtgggagtattacaccacacattagcaaatgtggctctcaggggttgatttattgttttgtttattgcctagacttaagaaagtgatggaaaaaatgttaataatacagattaaattgagagtatattatgtctatagccattactctgtgaataacacaaaaattagtgtaaatattcttctggtattggaaactactctcagatgccacaaagaaagccttcgtgttattggctttatccttgttctggcatatatctctactgtttcactttcatcttactattaatggaaataaaaatatcaaccaacattaatcttggaagtatacatgttcagcaattgcaaccattagttggctatagatataagagtctggccaacatcaattaaaacgttctgtgggaataaagtggccatatggaatttacaataagaagtactatatattttattatttgtgaattgtgtgctatgcatcatttayatcagtaaaccttataataaacttattatacacacacacacacacacacacacacacacacgcacctttttctcctggaaagccaatttgtaaatgtttactactgctaataggcaactcaaacttaacatgtccaaaactgagctcttgattttccatcctgaaccagttccccccacaagcatcctcatcccaattaatggcaactccatctttccaattgctctggccaaaaaccttaaagtcatctgtgactcttgtctttctctcattccctatattccacctgtcaggaaatacttttgcctctactttctttctttatttttatttatttatttatttatttatttttgagacagggtctcactctgttgcccaggctggagtgcagtggcatgatcttggctcactgcaacctccgccacccaggttcaagcgattctcctgcctcagcctctcgagtagctgggattacaggcatgtgccaccatgaccagaatctttttgtatgtttagtagagatagggtttcgccatgttggccagggtggtctcaaactcctgacctcaggtgatccgcccacctcggtctcccaaagtgctgggattacaagcgtgagccactgcgccctacctttatttttatttttagtgacagggtctcactctgtctcccaggatggagtgcagtgaagtaatcatgctcactgcagcctcaaattcctaggctcaagtgactctcctgcctcagcctcccaagtagctaggactgcaggtgcacactaccgtgccaggctacttttttttttttttttgtagaaacagggtctcactatattgcctaggctggtcttgaactcctagcatcaagagattcttgttgggattacaggcatgagccaccacacccagcctctgctttcaaaatatattcagaatctacttctcaccacctccactgcccacatgtccccttatgaggattactgcaatagcctcctgactactcttctcatttcagtactgcagtcagaatgattctggtaaaacataaattagaaatgtccattccctgattaaaacccttaagtggcctcccatcccattcagaatcaaagccacactcttcacaatggcttgtaagatgctacagtagctgtgtacccatcccttacctctctgatgtcatcttctgttactcttccccttgctcactctgctccagccacactagactctttgctgttcagcaaacacatcgtgcctgctcctgcctccaggcccttgtacttgctgcttcctctaccgagactgctcttctactttgctctctgacattctttaggtctttgcccaaataccattttctcagtgaggcttcctgatcattcaaattaaagttacaatccctccttactctataccatactactctaccctctcccccacttaatgccatgtaaagtactacatgttggccggttgcggtggctcacgtctgtaatcccagcagtttgggaggccgaggcggaaggatcacttgaggccaggagtttgagaccagcctagccaatatgatgaaaccccgtctctactaaaaataccaaaagaatttagctgtgcgtggtggtggccgcctgtaatcccaggtactcagaaggcggaggcacagaatcacttgaacccgggaggcagaggttgcagtgagctgagattgtgccactgcactccagcctgagcgacagagtgagatgccgtctcaaaaaaaaaaaagtaaagtactgtaggttttgtatgactagttttagtttttattctttctctctcccaacaggcaaggaagaagaaagaagctccccctgtacagagacagagggagggggtgatccaaagccgagagaggaaaccgcgagtacagcagaaaccagccagttacatgaggaggctggaataggcggtgtctgatttgcatagggctcaggggattggtttgactaattcattcctttttatggctgagtagtattccatcgtatggagtatgccacagtttctttatccactcgttgattgacgggtatttcagttggttccacatttttgcaattacaaattgtgttgctataaacatgcatgaccaagtatctttttcacatatgagctgggttttgaagcataaataggaaaggagaaaagtgcccaggaaagaaagttacagctgagaaatatttaactattaacttttttccccctgtttagtagaaatgcccatctatctggatttttttttttttttgagacggagtttcactcttgttgcccaggctggactgcaatggcatgatcttggctcaccgcaaccgccgcctcctgggttcaagtgattctcctgcctcagcctcctgagtagctggaattacaggcatgcaccaccacgctcggctaattttgtataaacatgtgagccacctcgcccggctcatctatctggattttaacaggaaatagcttggccaaacttgcaacactccaagttatatgaagtagaatttgagaactcctggttactgggacactcaagaaggggctgagtgaaagggacaggtggcaggaagagagcccaatggttccagaaggcagagagagaagagaccatttaatagctgtgggacccatcacaggcttaaggctcccaaaagagatggggaagaaggagcaggatgggcaggggcaccttatgtatgccttggcccttgcctggagcgccgtttcctctgctctccacctctcctgataatattgccttctcctgaagagtgaggccaccttggtggtgcagaaaaatcccatggtctacacctgaaggcctgggttcgagtcctagtaactatatgatcttgtggccagcttcaaaacctttgcttgccacactctagagagtgacttggcactcaaggcccttctctatcctgatgacccttccaatctcatctgccccacaccccttctcacctcaaacagccaagcacttctctgactctgtgctgtcatagatactgctctttcagtctgacgttgttgccctgaccctcctagagaattcccattcctctttcaagatataactccagtatcacctcacacctccagaaggccttgcctggctgctcaggctaggtagcaactgcctctgggtctctaggaggtagccctggagctacgtcaactccaacatctagaccacatctgctcttgccctttcctatcaactccacagaacagccagaaggattttttttttgagatagtgtctgtgtcacccaggttggagtgcagtggtatgatcatagctcactgcaaccttgaactcctgggctcaagcaatcctcctgcctcagcctcctaaatagctagaaccacaggcacatgctaccacacgaggctaatttttaatttttatttttttagatggagtctcgctctatcacccaggctggagtacagtggcacaatctctgctcactgcaacctctgcctcccgggttcaagtgattctcctgcctcagcctcccaagtagctgggactacaggcgtgtgccaccacacctggctaattttttgtatttttagtagagatggggtttcactgcattaaccaggatggtctcgttctcctgaccttgcgatctgcctgcctaggcctcccaaagtgctgggattacaggcgtaagccatcgcgcctggcctaattttttaattttttgaagagacagttcttgctaggttgcccaggctggtcttgaacgcctggcctcaagcaatcctccagtcttggcttcccaaagtattgggattacaggtgtgagccaccgggccctgtcgaaagagatctttctacaacaaaagactcattgtgatacctccctgctaaaaagaaccttcatttcttggtttaaagaccacagtccctactgtggcctactaggctctgtgtgatctcactccctcctgcctctccacctttccctctcatcctttgtcctctctgttccaaccaaatgaggcttctttgttactcaatgcaccatgttcctttccccccaggacctttgcacttgtatgttgcttcatcctgaccaatttctcctcattcttcagagctcagctcaaatctccctttttctggaaagccctccatggccctccaggctagtttaggtggtactcaccacaacagtaattttagagctatttataaattatttaattcctgtgtctccctggatagagataatgccctcctgttcatccctgcctaagaatcacctaaagcaaaacttggcatagaaaaggtgctcaggaagtttttgttgatgaccacaggagtgcttagcccttaccacattacataaaatctgcagtttacctggtttctctcacaccagcctgtgagtttccagaaaaaactcacagcctgtgagtacaggatccagccccatgtttgacatttcatgggctcaacaggggttttctgagcagggggagacattgtgatgtgctgcccagatcccccatcactgaggacttaggacagacaccagctgctaggagtgctgttagcacaaagcctttaatgtcagcttctccacagacagggccatcttggcccttgttgccccacttgccaggtggccccacatccaaggactgataaaggcaggatgacctggccatcttagctcatctgatgggctactctagctctagagtccctgtcgagtcagctaaaactgtcttggggcctgcatggagctcactactttccccctgtgccactcctgttccctcccatccttcccacgcctgttgatcccaagggtgctccctcataaacatcctgcactccaatctccatctcagaatctgcttccaggaacctaacctgcaacaggcccacggtcctctcttcttctcccagccatcactttcagggaacatgcattcattcacctgaagtttgcaggcaccattcaactgttaaagtgtttcgcatccgtttttctattacttccatcctataccgactagctccacttaacatgtggagaaactgaggtcggagtgggggcgtgaccaggccagcctaaggccgctgcactaatgagaagctgagctctcagatttttgcctccctgtccctgccaagtcgctgtttcctgggacaagagggagcctcactgaaacgaactccggtctcaggggacagaatcctgaaaccctggctctggggtccggggcaggggtgcgctgcctcaggacagacggkgaaactgaggtccagagccggacatccaccgcctgcggagggaacgagaacgcggcgcgtcctgccttgcgggccgagcggcgccagagccgcctcctcccgccccccgcgctagatccccccgccccgtctttgccctcgcgacgccgccacctccggaacaagccatggtggcggcgacggtggcagcggcgtggctgctcctgtgggctgcggcctgcgcgcagcaggagcaggacttctacgacttcaaggcggtcaacatccggggcaaactggtgtcgctggagaagtaccgcggatcggtgagtgcgcggggtctggcggcgccgctgggcccggcctcgccctggcggggcctgctggggacgccccgcagcccggtcccccgcgcggtgtggctccgaggacgctccagccgcgcggccgccaaacaaaggcccccgccccgctcggccgtgacctctggcgcggcgcccccatcccgcgcccggcccggcccggcccgcggctacatggcacggccttggcgcggaggaacccgaagcgctcgcagtcggcgcccacttcgctaccggcactttgggcagcggggtccagaccttcgccgggaggccgggcaccactgcccagcctttgccattcacgggtgaaaaaagtaaccgtagcatcgtgcggcctttccctctcccgtcctcattttctgcatctggaacggggagtggctgattcggagtccagtgaagaacactgtggagatcaatgtgcagggcagagagagagttatttcagatgcacggagacctcacacggatcatccctgggagagggcacaaaggcccagagagggcaggcattcgcacaaggtcacactacactagaaagacggggcctggaagagaaccccaccgccacatccggggtcctctctaggccaagtccttagatggcagctcaggggcacacataagagtcatccaggctaattgccccctcattaccaagagggaatctaagctcagagaagacttcggagaggaagggtatctgggttgagtctttgaatacgagtggattttagcaagactaagaagcaaacagcaagaagggggtgggggggcgcggggccaggagttccagctgttgtgcttcaaagagtctaaagctggaggctacgagtggtggaagatgaggctgaaacgactggcaagggagcaggcgggaccttgaacactacattgagaggcctgcatgtcacattatgtgcagtgaagaactcccagagtggacctcttcaggatggacctggggactggtgtgaaatggctggggagttgaaatctaatgaacaggtgggccagcgtccagttttggatgaaccacacaaaaatagatgtcaacatttttctcctgggagcaacaccatctttagtgaagaccagtactctataagccttgaaattttcgattatgctgggagtcttggggacagtaatccctgcttgattgtcccccagagtgtcgtgagtttcaaatcagatgaaggcgtggatgcacttagtaaactgtagagtgctttgcacctgtgtttggtggatsccagcaggaacttcatttagaactctgggcaaagaaccaagaacagggcccgctccaattcaggcctcctgttctctctagggcagctcaccagagagccccaggtttagcgtctgaccagctctgctacttattaattcgttgttcattattgaacacctactgtatactaactagatactaggtcaggccctggggatacagtggtgaacaaaacagatacatttccactaaatggagcttacatggggtaaggagaagaaagacaataaacaaggaactgagaaatgcacgaggtaattcctagtagtagtaagtgctaagacaaaaatagaacaaggtcacacagctagtaagacagtaagaatttgaacccagacagtccagctccagagtctatgctcttagttgccaagttcagcagtaaaccagggaacagggagtccagaaaagctgtaattggtgctgagttaacccaggctaggcttgctgcttgggcaatatgctcattccttcacctgcaaacatttactggctcctactacatgtctgacactgggtccagctctgatgacatagtcatgagcaagattgacatggttgatgccctcaggctaattgggaccatagtcatttagaccagtatggatgaatgggtgaccacttgggaatgtgtggggttatgtgtagtgtgtgcctttgtgaatggtttacttcttctgtgtacaaatctgagtctgtgtctgtgcttgtatatgtacatatgtaaattaactgtgtgtacttgggtgtgtctgtctgtgttttggtttctaaggaccaagctttttggtttcagggatggaactagaagccagattttcccccttccaaaagagygggcagacatgcaagttgtgagttaaaaataagcaagctttggccggacgcagtggctcacgcctgtaatcccagcacttcaggaggctgaggcgggtggatcacaaggtgaggagttcgaggctagcctggccaacatggtgaaactccgtctgtacttaaaaaatayaaaaattagctgggcatggtggcgtgtgcctgtaatcccagctactcaggaggctgaggcaggagaattgcttgaacccgggaggtggaggttgcagtgagccaagatcgcgccactgcactccagccttggtaacagagcaagactctgtctttaaaaaaaaaaaaaraaaaaaaaagctttaatgttctcattgcccagggatccagcagggggaaaaaaaggaagaaccctaactgaggaagggagttaacagtcccagtttctcaccattccaggcacagtatggtgtatgctgacctcaaattgaggaggttgttctaatagccagtggccccaggcatgggtcctttctcacctggtggaggtagggtacaggaggtacagctcagtggttcaatcatctagcccagtagttctcaactaggagtgattattccctttagggcacaattggcaatgtctggagacattgttgattgtcaagactgggcatctagtgggtagaggccagggatgctgccaaacatctgataataaataaacaggacatccccccgacaacaaagaattatctgacccaaatgtcaattatggaggatagggctaggctgcctaggcaccggctagggttttaaatccattaataatatatacctagaagctaaaaacatagcatttgagccaaaattctaatcaaagtcttataatcaagttccattagccagctttgtatttattgcctaaaggctttaataaatttaaggattagtctaatgataaaagaaagtggtaggctgggcatggtggttcatgactgtaatcctagcactttgagaggcttagctggtaggattgcctgaggctaagagtttttgagtccagcctggacaacatggcgagaactgtctctaccaaaagtaaaaattaaaaaattagccaggtgtgatggcacgtgcctgtagtcctagctatttgagaggctgaggtgggaggatcacttcagctcagaagtttgagactgcaaacggttggggggatgtcctgttatgattatgccattgctccagcagcaacaacaacaaaagtggtgttagttctctggagaggagggggacaaaaaggtgattgccctggagttatgagggttcttttctcaagaaaacctgtgtctatgttcccatgcaggcgtttgtgtttgtgtgcacacttactcattcatctgaaacttactgagactttttcatatgccaggcccagagatgaagtggacatagctcctgccctcagtaggttcacattctagaagggagactgacacagtgcagagtggcgagtgctagctgactgagccaaaaattgagcccaggtctccctttgtaccccctcttatcagttctcagtatgtgctcaccagtatgtgtgccccagtctgtggatgtgctgtgtgtgtgggcatgtgtggtgtttgctaacatgtttgtatcgtggtgcatgtgcatacctatttatgtatgttgtatacttatgttcacagatgttcatgtatgtgtgcacacatctgtaagctcctgaatgtttgatttcatatgtgcctgtctgtgtgcatgtgtttgtgtatgtgtgagagcactggacacacatttacatatgtgtacacagtgttcttgtatgtgtgaggcagtattaactgttgagggagtcacatatgtggatgtgtcagggcatgtacaggttcatgcctcttcactggcttgtctgggctttgttttgttttgtttctgtcatacaggtgtccctggtggtgaatgtggccagcgagtgcggcttcacagaccagcactaccgagccctgcagcagctgcagcgagacctgggcccccaccacttyaacgtgctcgccttcccctgcaaccagtttggccaacaggagcctgacagcaacaaggagattgagagctttgcccgccgcacctacagtgtctcattccccatgtttagcaagattgcagtcaccggtactggtgcccatcctgccttcaagtacctggcccgtaagtcctggtctcttcatcccctcacacctcccttagctggctgaggccatggctccctgggcagcagaagccactggctggttgggtgacctggggccccttccccttcctgatcatctcrggtggactgatgctttgttccagcactaatctttgaggagagtggaggcaggtasaagctgaggggtattcctgcctaagaatatctccatacctgctgcctctcacttgtccctcagaagtcactcttttggacttttctgggatcctgttttcacattcaggggctcctagaaggagacatttaagtcagtgtgaactagatgagtttatggacatatgatggagaaaccaaggcatagacaggggaggccacctgcttggagaaagctgaccaagatagtagacaggcatcttcaccctgagtcagtggcggagtctgtaggccatggagggagaccttctaagctaaaataccagatcttagtatttgagaacaagatcccttctccagctgcagaagcctcagagccacagaatgggctcatgggctaagcttgccattctgaccatttcttccctcaggccttctcctctggaggccccatttttgccttttctgattccgtgcttctggtggcctttgtatcccttgccaccaccccaccctgcaacccattcacctggaggagtaaatgagaagcaasagtgcagcaaacaaaaggtcccttactgcggcaggtttgtgttttgctctgtggctcagtcctaatgttkatttttttctctgtgttcttttattagttccttcccagttctcacagttatagatcaaacccggccttgcttttagaagcacctggggagctcttaaaaatgcacaaggctgagacctactgaagcagggcccaagaatctttattttaagcactccccgacccccagtgattctgatgaaaccagtccatggactaacatttggaaaccattaaaactgaactagagaatagggtgtagactattcagtagttcgaagtcattaataaaggaggatttgataccactttatcaagcacgtcacagaatcctacagcagtcgttctcaacctcggccccactttggaatctcccagggggcttttgaaaaatgctgatgcctgagcctcaccctcagagattctggttggagtggtctggggtgtggactgggcatcagkattagctgccaccagggaaagatggacactgagagtgaagtcccaggagagggtacgcagggtagcacgctttgctctccttcctttttctctagagacttctgggaaggagcccacctggaacttctggaagtacctagtagccccagatggaaaggtggtaggggcttgggacccaactgtgtcagtggaggaggtcagaccccagatcacagcgctcgtgaggaagctcatcctactgaagcgagaagacttataaccaccgcgtctcctcctccaccacctcatcccgcccacctgtgtggggctgaccaatgcaaactcaaatggtgcttcaaagggagagacccactgactctccttcctttactcttatgccattggtcccatcattcttgtgggggaaaaattctagtattttgattatttgaatcttacagcaacaaataggaactcctggccaatgagagctcttgaccagtgaatcaccagccgatacgaacgtcttgccaacaaaaatgtgtggcaaatagaagtatatcaagcaataatctcccacccaaggcttctgtaractgggaccaatgattacctcatagggctgttgtgaggattaggatgaaatacctgtgaaagtgcctaggcagtgccagccaaataggaggcattcaatgaacattttttgcatataaamcaaaaaataacttgttatcaataaaaacttgcatccaacatgaatttccagccgatgataatccaggccaaaggtttagttgttgttatttcctctgtattattttcttcattacaaaagaaatgcaagttcattgtaacaatccaaacaatacctcacgatataaaataaaaatgaaagtatcctcctcattttccatagtctccctccctagaggtaaacagtgttagcagtttggtacaaaggctgccaggcctttggttaagccaatcattattgcccaataagaactcagtgaccgggcacggtagctcacgcctgtcatcccagcactttgggaggccaacgtaggtggatcacctgaggtcaagagtttgagaccagcctggccaacatggtgaaaacccatctctactaaaaatacaaaaattaggctgggcgcsgtggstcacgcttgtaatcccagcactttgggaggccaaggcgggcggatcacgaggtcaggagatcgagaccaacctcgctaatacggtgaaaccccgtctctactaaaaatacaaaaaattagccgggcgtggtggcgggcgcttgtagtcccagctactctggaggctgaggcaggagaatggtgtgaacccgggaggcggagcttgcagtgagcagagatcgtgccactgcactccagcctgtgcactctagcctgggcgacagagcaagactccgtctcaataataataataataataaaaataaaaaaataaaaatacaaaaattagcctggcatgaccgggcacagtggctcatgcctgtaatcccagcactttgggaggctgaggcgggtggatcacctgaggtcaggagtttgagaccagcctggccaacatggtgaaaccccgtctctacaaaaatataaaaattagtcgggcatgatggcaggtgcctgtaatcccagctactctggaggctgaggcaggagaatcgcttgaatccgggaggcagaggttgctgtgagcggagatcacgccactgcattctagcctgggcagcagagagagactctgtctcaaaaaaaaaaaaaattcactgagtaatccactagccaaaagtacacctcaataacaaataggcaaaggagatgaatagatagttcacggaagactatagatgcgtaataaggatacaaaaagatgtccagcctcattgaagttggaaagttttttgtttgtttgttttgtttttgtgatggagtctcgctctgtcgcccaggctggagtgcagtggcgtgatctcggctcactgcaagctcctcctcctgggttcaagcgattctcctgcctcagcctcccgagtagctgggactacaggcgcctcccaccatgctcagctaattttttttttgtatttttagtagagacggggtttcatcatgttagccaggatggtctcgatctcctgacctcgtgatccgcccgcctcggcctcccaaagtgctgggattacaggcgtgagccactattcccggccgaaagatatttttttaatgataatacccctggttggcagggatgtgaggaaatgggcattcacataaactgtggtacgataaactggcacaagtgtttggagggtgatttggcaatatcttttaaaacaaaatgctcataccttttgtttttgctttttgttttgagacagggtcacactctgttgcccaggctgaagaagagtggctcgatcgtagcttactgcatccttagcctcctgagtaactaggactgcaggcacacgccaccatgcaacatagtgggaccccacctctacaaaaaaatattagctggccatggcagtgcatgcctgtagtcccagctatcaggaggctgaggcgagagaattgctagagcctgggaggtcaaggctgcagcgaaccgtaaccatgccactgcactcagcctgggtgacagaggagaccttgcctcaaattataaactaatatggttattaaaatgaatgaatgaagtctccatatgctaccatagaaagttgtccaaaagtgaaaaaatgataagttgtaaaacagaatgaacacattcacgtacccagaaaaaccagtatgaacaagtgtaatgtttttattaaaaatgtacaatgttgctgggtgcattaggtggctcacgcctgtaatcccagcactttgggaggcagaggtgggaggattgcttgagcccaggagttcaagaccagtctgggcaacatggcaagaccgtgtctctgcaaaaaaatttaaaaattagccaggcgtggtcactcacacctgtagtcccagctactcaggaggctgaggcaggaggattgtttgagcccaggaggttgaggctgcagtgagccgtgtttgcgccactgtactccagcctgggcaatgggagtggaccctgtcccaaatttttaaaaaatttacaatgttaagtgggagggaaagagagagggaaaaatatagaccaaactcttaatggtggttgtctgcgaggggctgaggtaggataacaggagtcattttcattaagtttctgtaatgtttgaattttgtatgtcaaatccatatttcacctttatataaatgtggaaaggtggctaaaaattggggtgcagcctgggaaacacagtgagacttcatctctacaaaaaatcaaaaaattagccaggtgtgatggtgcacacctatagtcccagctactcaggaggctgagtgaggagagtcactggagcctgggagtttgaggctgcagtgagctatgatcacgccactgcactccaacctgagcaacagaccaaaatactataaaaaaaatggggtgatgggcagagtcactggtagataattcattggccaataagaatttcaggtgtactttatctaaggtcactcttctagaagtctggagactcagattcaagttcctgttgtgcccctgactcacagcaaattcttccctctctcctgtcctccgttttctcactggacaatgaaagggttaaaccgtgcttaggattttcacagtctcccttcatggtgcttctcaaaagctaacaaaagtaaagtgaaggctgtccatggggtgaccacagcccctcctatggtggcctctcagctgcccttacacaccctcctcttagctgcagctctgcatgtacttgtgtgcatgcacacacacacagtgaagcccagcttgcacacatgttcacactggacatctgggaaccacagtctcctgcagctaccttcctccctccatacccactgtctccaccacccgtatgtatgcctcccctcactgtgcccaccaaggccatcacttagtgccttatcgttaaagccaatgaatatctctcaccttgtcttccttgacctctcagctgcatgtgacactgcagactctgctcttctccctggcacttgctcggtccttggcgttcctctgtcttctcttagtttcccccatctctctaagtgttccttcgttctcagtgtcaatgtctctcccttctctatccaccccttccctgttggtcttccatggggttctagtctgatctagtttctcaccccatataccgttctgtagccagctcattttttcccatggttttgaccaccatctacaccctgctgacacccaaatctctatatccatgcaggactcccatccacctgcctcctgggcatctctacagatacctcaattcaacatggccagaactaaattcaccctcatctttccccaacacatctgctctcccttccattctgccttggcagcccctggagctttctctttcacacaccacttacttatcacactctattcccatcacttaagaaactgccctcccttccctctcctgagcacagtgctaggcccttaatagatgaaattaaattatgtcataagcctttggagtaccaactccatgcctgctcctgcctaagccctatctggaaaccaaagatgagcaagcccatttcctcagaaatttagagtccgtctgaggaccttacgctcccaattagccctgtgtttctgtggactttatcagcttctgctgttcccaacccccctctaatacatgcaagagtcccctaggaaaaagttactttaaatccttatcaacagtcaccttagtcattggttaaccagtatctgctaagatcttggttttaaattaatcccttggttatcaaataacacttgagtagttaatatttgattatctactaacaccaccttagttatcttctaacaccttatttacaagccaaatactttatttattcagttatatcttaggatttagtagtttaaaagtatttgctatgtcttagttattcatcaaattttcttttttttttttttttaacaaggtcttactctctcacccaggctggagtgcagtggtgcaatcacagttcactgcagcctcaacctcctaggctcaggcaatcctcccacctcagcctcctgagtagctgggaccacagatgctcaccaccatgtctggctaatttttgtattttttgtagagatgggtttttgccatgttcctaagctggtcttgaactcctgggctcaagtgatctgctctccttggcctcctaaagtgctaggattacaggtgtgagccaccacgcccagccttaatcaatattttagttacctgatcccttagctctctgctgagtttagagtagattagcaagtcagaaaccatcagttaggagtttggggaagaggtcatttctgaatatggaaaaatacaggcctttgtcttttactgagctctcctcttacccccaaacgattctctttcaacatcaactggccccaggtcctgagagaaaaggaggtcccatcctaattgcttatttgtttctctgagccaggctgtaggggacttcctggaatgttgtgattggcagggactttcattcatcaacaaatgtttcttgagcactgcatatctgtcaagttctccctaagttctaactgtacatcagcaaacaaaatgggcatgttcccagctgctatggctcttagagaacagtggaaaagataaacattaaacaaatagttattctgattattatgtgattacaattatgataagcacagggattatgataagtacagggagctgtgagtgtgtataaaagtggcacttgacctattgtgggattcagagacttccttgaggaatgacattaaagctgaaagctgaaattttaataagagttagggaaaaaatggtaaggaagtcctaagcagatagagtggcttgggcaaaagcctaaaggaaggaaaaggctgatatgatagagctagtgctgcctggagccacatgataaggagaaggaccagagaggtaggcagatgccagatcatgcagggccttgtggaatctaagtgagaaatgatgtgacctggcctagcatgaagcgtctgtcttctattggtataagaagatcttccttagagtcccaaatctgacggccagaaataaaccctggggcagaggcagtcattgaaccactggtagaagaaggctgcagctgaatgcagtggctcacgcctgtaattccaacactttggaaggctgaggagggtggattacctgagttcaggagttcgagaccagcctgaccaacatggcaaaaccctgtctctactaaaaatacaaatattaaccgggggcagtggcttgtgcctgtagtcccagctactggggaggctgaggcaggaaaatcgctttaacctgggaggcggaggttgcagtgagcccagatttcaccactgcactccagcctgggcaagagtgaggctccatctcaaaaaaaaaaaaaaaaaggagtaggctgttctgctttgggggctgcctggaggacaggtcaccacggagacacctgtgaaaagcaagcagccctgaaattccccagctctctagctgagccagccaaggggtagctgagaagattgccaagactggagtccctactaaccacctgctttcacggattcctggacacccctggagtgattacattgcagatagtccattttttttttttttttttttgagacagagtctcgatctgtcgcccaggctagagtgcagtggtgcagtcttggctcattgcaa

SEQ ID NO: 93964 - DNA, 15045 bp, Homo sapiens
gaaaatagggccaggcgcggtagctcacgcctgtaatcccagcactttaggaggccgaggcaggcagatcacatgaggtcaggagttggagaccagcctggccaacatggtgaaaccccatctctactaaaaatacaaaaattaaccgggcctggtggcacatgcctgtaatccagctacttgggaggctgaggcacgagaatcgcttgaacctgggaagcggaggttgcagtgagccaagattgcaccactgcactccagcctgggtgacagaatgagactatgtcaaaaaaaaaaaaagtgttcatggtagaatggtagagagcagtggcccttggtccaacaaagccagtcttaaatcataaacattcataactctatcatgtcccagctttaacaattttgtaacccctgttgagcctcaggttttgccagctgtaaagacagtgctattacttacttcacaagacagttgtaacggccaggcatggcagctcacacctgtcatcccagcactttgggaggctgaggcaggaggagtgcttgaagccaggagttcgaggctagcctaggcaacttagcaagatcccatccctacaaaaaaattttaaagattagccaggcatggcggcatgtgcctgtggtcctagccactccggaggttgagatgggaggattgcttgagtccaggagttgtggttgcagtgagccatgcttgcattattgccctccagcttgggcaacagagcaagaccctgtttaaaaaaaaaatagggcctggtgtggtggctcacgcctgttatcctagcactttgggaggccgaggcaggaggatcccctgaggtcaggagttcgagatcagtctggccaacaggacaaaaccccgtctctactaaaattttaaagaaaaaaaaattggccgggtgcggtggctcacacttgtaatcccagcacattcagaggccgaggcaggtggatcacctgaggtcgggagtttgagactagcctgaccgacatggagaatgcccgtctctactaagaatgcaaaattagccgggcgtggtggcacatgcctgtaatcccagttacttgggaggctgaggcaggagaattgcccgaacctgggaggcgtaggttacggtgagccgagattgcaccattacactccagcctgggcaacaagagtgaaactgtctaaaaaataaaaaataaaaaaataattagctgggtgtggtggcacatgcctgtaatcccagctactcaggagggtgaggcaggagaatcacttgaacccagagggcggaggttgcagtgagccaagatcacaccactgcacttcagcatgggtgacaaagcaacactccctctcaaaaaaaaaaaaaaaatttaggctgggcatggtggctgacgcctgtaatcctagcactttggcaggccgaggctggtggatcacttgaggtcaggagttcaataccaccttggccaatatggtgaaaccccatctctactaaaaatacaaaaattagctgggtgtggtggctcattcctgtaatcccaggtacttgggaggctgaggcaggagaatcacttgaacccaggaggcagaggttgcagtgagctgagatcatgccactgcactccagcctgggcaacagagcgagactccgtctcaaaaaaaaaaaaatagttgtaagaatcaaatgagacaattaaagcaaaccacctaagacaatgccttggctgattcccttcccagtactcttcccctactcagtcctcctcagttacagggattctctttctcacaaagattaaattctgctgtaaaaaccacacacatctccaaaagtaatgtgtataccctgagggctggtttcaaaacttggtcatcctttaaaacctccaagtacctagcacaagactcagtaaggacgtgttcatctgccgactcactaaccaaataaaagttttccaaatgctagacagttaatcccttttctcacgccattttctcccctgctgttcaggagctgtatatgccattttaaatataaattccatgctggacatgagatttctcatgcctgtaatcccagcactttgggaggctaaggcgtgagaatcccttgaagccaggagttcaaaaccagtctgggcaacacagaaggactcatatctcattagccaggtattgtggcacacacctataatcctagctacttgggaggctgaggtgggagagtcgcttgaccctgggaggtagagcttgcctgggtgacagagaaagactgtctcaaaaaaagaaagaaagaaagaaaagaaagactcccatctctacaaaaaattttaaagattagccgggcatggtggcacatacctgtggtccgagttactcaggaggttgaggtgggaggatcgcttaaacccaggagttcaaggctgcagtgagctataatcatgccactgcactcctgcctgggcgacagagcaagaccctgtctcttaaaaaaaaaaaaaaaaataggccaggcgcagtggttcacatctgtaatcccagcactttgggagaccgaggcgggcggatcacctgaggtcaggagtttgagaccagcctgaccaacatggagaaaccccacctctactaaaaatacaaaattagcggggcgtggtggcacatgcctgcaatcccagctactcaggaagctgaggcaggagaattgcttgaacctaggaggtggaggctacagtgagctgagatcacaccattgcactccagcctgggcaacaagagcaaaactccgtctcaaaaaataataatttttgtgttatatatatatacttgtatatatacgtatatatatacacatatatatgtgtatatatatgtgtatatatacacatatatatgtgtatatatatgtatatatatacctatatatatgtgtatatatatgtatatatatatacctatatatgtgtatatatatgtatgtgtgtgtgtatatatatatggctgaacgtggtggctcacacctgcaatcccagcactttgggaggccaaagcgggtgaatcacctgaagtcaggagttcaagaccagcctggcccacatggtgaaaccccgtctctaccaaaagtataaaattagctgggcgtggtggcaggtgggaggctgaagcaggagaatcacttgaacccaggaggcggaggttgcagtgagccgagattgtgccattgcactccagcctgggcaatagagtgagactctgtttaaaaaaaaaatatatatatatatatatataatatatatatattatatatatatatataatatatatatatattatatatatatatgtaatgttggttgcatctatccattcatgacaatggaaaagcataatgtgattcactgccatgaaaaacattcaaacttcttagggttctaggcttcttcatgtccacaaacacagtcacagtgggcttttttagccgtctgttttgtttcggtttttttgagagagggtctcgctctgtcacccaggctggagtgcagtggcgcgatcatggctcactgcagcctcgacctcctgggctcaagtgatcctcccacctcagcctcccaagtataatagctgggatacaggcacacgccaccacacccagctaattcttgtattttttttgtacagacggagtttccctatgttacccaggatggtctcaaactcctgggctcaagcgattcatccacctcagcctcccaaagtgctgggtttacaggcatgagacaccacacctggccaccatctgtttttcagaataggttcttcttgtcataaggacaaagcaaagcaaaagatcatgaaacaatgttttttctttttttttttttttttgagacggagtcttgccctgttgcccaggctggagtgcaatggcgccatctcggctcactgcaacctccgcctcctgggttcaaacgaatctcctgcctccgcctcctgagtagctgggattacaggcactcgtcaccatgcccaatttttttttaaattatttttagtagacacggcgttttaccatgttggccaggttggtctcgaactcctgacctcgtgatccacctgcctctgtagaaggagggatcagactatccccaaaagaccacccctcacattcaacaagtgattctctgcttttgctagcaatatcctgtatgtagaaaagaaagcagaagtagattctctgttacccttcctgccctaggrggattccacggatcctgagtcaccctgggagattatgaaactcaaaggtctttctcaaagatctttaaaaaccactgattctcaactgccaaattacagctactagtctttcctgatagtgttggctagacctcatggatgaccagaaggccttttcctcctctgcttctgtctaaaatgtcaggacttaggagcgcttgttatacatttcctggtaacagtaaattagaccgctatgactaagcgctagtgacagctgcgtagctaaagcaaaaccaaagccatcttctgtttgggttgcttagtttaatagaatagtgattgttttggctgggcacggtggctcacgcctgtaatcccagcactttgggaggccgaggtgggaggagtacttgagcccaggagttcgagaccagcctgggcaagatggtgaggccctatctctaccaaaaaaaaaaaaaaaaaaaaaaaaaacttatcaaggaatccaaagaccttaccttcgaaaattgtaaaaaacagtaatacacaagcacatattcttttagtcaccagagcaatgacatcatcacatattctgtaaatgtataattatttcaaaaaaaagttaaaggaaatgaagcacagaagatgaatcaagtagggattacaacaactttcaacagcaaccgaagtcagaagacagataccatcaatgtgctgaaagaggaaaacttctgaacctcaaaatctataaactatgaaataaacccttcaagaattttaagatgggctggtccaaaggtagtgagttatctcagttgattgttcacaatcagttacacatcaaactccttattttactctgactactgcacttgactagtctaaaaaaagaattataagatgaattaaagacacgttcagataagcaaaactgagaacgtttggcaaaagcagatctttactaaaggaaattatgaagaatgtacctcgggcaaaaggaaaagtgtcaagatcaagtgtcaaggaagattagagatttaagaaggtataagaaggttagaaaagtaagaaaaaaatatgccgtcaactctaaaaactacaagtataaagaaaaaagattattgggaaatccaaataacctaccttaggaaattctaaaagaatatacgagctcacattcctttggtcataagagcagtgtcatcattagacatcaggtcgcctctggaaaattccattgtgagtttaaaaggcaaatgacgtctataattctaaaactagttctcccaccgaaactctagaaaggatcttgggatctgcagggtctcccggatcacactttgagaactgctgctttagtcttcctcccatctcctaaggccagagctcctgagtttgcttcccactggccaaggagaaaagagcaaggtcacttgtcggggggctgcagagggaattaccttctttcatttgcaaatgttactgggggacacaccggctcccagtagggtttccgccaaggctccgcgaaacgccactagagggcgccgctagcgaatcccacagcgcgccccgctgcccccacttttgtcctccgggttcacacgggcgcccggaagagagggtggtgcctgggagaggaaacgatgcgccccggggccgcggcctcattggatgagaggtcccacctcacggcccgaggcggggcttctttgcgcttaaaagccgagccgggccaatgttcaaatgcgcagctcttagtcgcrggcygactggtgtttatccgtcactcgccgaggttccttgggtcatggtgccagcctgactgagaagaggacgctcccgggagacgaatgaggaaccacctcctcctactgttcaagtacaggggcctggtccgcaaagggaagaaaagcaaaagacgaaaatggctaaattcgtgatccgcccagccactgccgccgactgcagtgacatactgcggctgatcaaggtagcggagagccagagctcctcccggggcgtggggtggaggtggctccgtttcccagrgtggggtgattcacgtcttgaggtctcggccggtgygagagcccagcctgttcccctttctgcgcccatccccggctcggccgccaccccgcccgcscgccccattccsttcccctgagctggccgggccggagcctcattttgttttctacttttttctctcctatgtgcatccccccaggagctggctraatatgaatacatggaagaacaagtaatcttaactgaaaaaggtaattcaacagtggcgggacgggggacaagcgttcggtgcctgtcaccttcgccaaggccattaccgcccctgctcccccttcttgcagatctgctagaagatggttttggagagcaccccttttaccactgcctggttgcagaagtgccgaaagagcactggactccggaaggtaaccyctcgccctttccagaagccagagagaccaagtgttatgtaagaagtagtgtcggctgtgtagaaccactgactacrcaggccgaagttactgagaacttggacagaaaaaatagccagcaagtgttcaaactactgaggaaaaaaaaaawttagatatgctgcacttaagaatactagggcaggttaaaagagctgtttaagtaagtatcagagtgctgtggagactcggaagtgtttaagctgcttaagtaagtataagtgctgtggagacccggaagagttrgatataatgtcatttgttgtaattcagtttcataaaatggttcttgtttgaccctaacgtaacagtttttgtaattgtgttaaatcacayttttttctttaatttgtcccaatcttcaggttacagtctctagcttcgccatgtacatggcccttccgtgtacatggatgggcggggaggtaactaaaagatcctttacacaataaagtagatgatcatgataaatgaggtaaggtcctattatcacacacttcaaacacggtagatcagaaacccactatgatactcgctksctgtctgtttgctaaggaatataaaatggctagaaagtttaatttgaaacctttgcctccatttggaatagtagacaccagttaagagggtgtcagatgcctttttttttttttttttttttttggctggtccctgttgattggtcagaagacagctcagctaaaaggggaagttgtctgggtggttgctttttttctgacgtctgttcctcaggctggaagaaatgagcagaaaacaagggatgagtactttttagagtatgtgcatgttacgtaatacctgtttctgggcaatgctgcttcttctgactcaacaaatggggagagcaaattgaaaatgcgtaaattggaaggcaagttctgaaattaaacgttgtactttggcctgatgttctgacctttaaggaagcaagagtttgtaaacttccaaatatttactattctgaactgccgtgtaaacctgacgtattcccaagtcracataccagtataccaataggatgtgaataatgtgtgtgttgagtttaaaaccatagcagttttgctctggcaagtaatgaaagcgttctcgcttcctgagtgtgagctccagcagactgcagagtggccagtccacagttgtagcctgacttcagtgagttctgatgtgtgctttttgcaaatacatgttctcagaacagtgagatcatccagcagtggcctggactgcactcacataaaaatcatgagacagccatggctacttgtttctgtaatacatgcatgtgtgttttttaaaacctatgataggcctcygattctgcagctgcaacttttatggaatgttttccttctccacatctcatgtgatgctcttattacaggacacagcattgttggttttgccatgtactattttacctatgacccgtggattggcaagttattstatcttgaggacttcttcgtgatgagtgattatagaggtacgattgagttcgkagcagagggtctgaagagagttcagagttayaaatgcttacaatgactttttaaattgtactctttctttttaggctttggcataggatcagaaattctgaagaatctaagccaggtatgtcttagwttttggtttccaaatttgtaagtttactggattattttaatratggaataaaaattgggtcttgagagcaggctgaaatgtcactgagtgtgtgttttactctctcataataggttgcaatgaggtgtcgctgcagcagcatgcacttcttggtagcagaatggaatgaaccatccatcaacttctataaaagaagaggtgcttctgatctgtccagtgaagagggttggagactgttcaagatcgacaaggagtacttgctaaaaatggcaacagaggagtgaggagtgctgctgtagatgacaacctccattctattttagaataaattcccaacttctcttgctttctatgctgtttgtagtgaaataatagaatgagcacycattccaaagctttattaccagtggcgttgttgcatgtttgaaatgaggtctgtttaaagtggcaatctcagatgcagtttggagagtcagatctttctcctygaatatctttcgataaacaacaaggtggtgtgatcttaatrtatttgaaaaaaacttcattctcgtgagtcatttaaatgtgtacaatgtacacactggtacttagagtttctgtttgattcttttttaataaactactctttgatttaattgtttggtgtaagcatttttactagttctttatttcttacacatctttcttgctgttgaagacaaaaatgacccgcaaacatcattggatgaacagaattgctcaaaatagtttttaacccaatttaaagtttttatggtcatgtgttatgttagtattaacaaagtctggatagaagccagtttaccagttggctatcaaggttttatacatagcaacatgtaaaacatgacttttttttttttttgagacacagtctcattctgttgcccaggctggagcgcagtagtacgatctcagctcactgcaacgtctgcctcccgggttcaagcaattctcatgcctcagcctcctgaatagctgggactataggcatgtgccaccgtacccagctgatttttgtatttttagtaaagatggggctttgccatgttggccacgctggtcttgaactcctgacctcaagtgatccacccacctcagcctaccgaagtgctgggatgacaagggtcagccacagcacccggcaaaacggctttttacgttgatgacactatacactgcatctgatggatttttttttttttttttttttgagacagtctcgctttgtcacccaggctgggcagtgtggagtgcagtggcacgatctcggctcactgcaagctcctcctcctgggttcacaccattctcctgcctcagcctcctgaatagctgggactacaggcgcccgccaccatgcccggctaattttttgtattttttagtagagacggggtttcactgtgttagccaggatggtctcgatctcttgacctcataatccgcctgcctcggcctcccaaagtgctgggattacaggcatgagccactgcgcctggcctgacggaattttcaagagctgaaaaccaagttagaaactgaggcccacaatgaataaacccatcattacacaagtaaaatgtggagatgggattatgaaacattgaaaatcaagaaaaaacatcttgtccctaaaaacctcatgccacataagatttttttttttaacagagccaaggtctcattcaatgaataaactcatcattacacaagtaaaatgtggaggtgggattatgaaacactgaaaatcaagaaagaacatcttgtcccccaaaacctcaygccacacaagactttttttttttttttttttttgaggaagagtcttgctctgtcacccaggctggagtgcggtggcacgatcttggctcactgcaagctccgcctcccggkttcacgccattcccctgcctcagcctcccgagtagctgggactacaggcacccgccaccacgcctggctaatttttttttttttttttttttttttagaggagacggggtttcaccgtgttagccaggatggtcttgatctcctgacctcgtgatccgcctgcctcggcctcccaaagtgctgggattacaggcgtgagccaccgtgcccagccaagactttttttttttttaatagagccaaggtcttactctttcgcccaggctgcagtgcagtggtgtgatcacagctcactgcagccttatcctcccgggttcaagcaattttcccacctcagcctcccaaaagtaactgggactacagctgcatgccaccatgcccagctaattttttttatttttagtagagacagggtcttgctaagttgcccaggctggtctcaggtcctcctgccttggcctcccaaagtgttgggattacaggtgtgagccatggcacctgaccaagataattttgaaggtaaagcggatcactgaaattagggtctcctatgtgtactgaaaaagtacacatttttttacaggaaatttgcaaacagaaaagctccagttggacacaagcataaatcagataaattaacatctcatttggagggtgaatttgtagtcctgtgttaatacaacggatttttagagcagagaaacaatagcccttaaaactgccagggggtaaagaagtaaacaagtgctttcttaaggactgaaatgaaaaagaaaaagaccatttccccctagatatgtgaactcctttcattattcatgacattggcccaaattcctaaaccgactaatttccacaataatgaaaacagtagttgataagaaccactgtagactaatgtccaagataaatgttttccaaaagaagtcagatacctgaaaacaatgctctgtatctctctgagttctccagcaaatcagtactgagctcctcagtcaaaggtaatgttgtcctgcaagcctttgtatcagtgtctgttatggcttcctagattagaaggcagccacatataaaaatgtagccctgtattatatttaatacaggagggctttgggatttattggtggctcagagagcatgccatgaaaatgggcttacagagtcaatgatcaaccaggggccctattaggcaggcaagtaactacataagagaaactctggcaaaaatgaaagggtaactaaacacaaagagccttgtggagaagtaagatattttgcaaattgtgttttggaaagtgagcctcttagaggaaaacaactacatgctgactgtggttaaatataggaataaattaaattaaccaccaagttacaatataactctttgtttcctcatctttcttagaacttagccttaaaggcccagtgttgtgaagatgaaggcttttatgaagttttgtatccactttaaagaagccccttaagtgtaaattttatttattttaatttttatttgtttttagttgttttcttttttttttttttcttgagacaggttctcactccattgcccaggctggagtgcagtggtgcaatcacaatttactgcaacctcgaccttctgggctccagcaatcctcccacctcagcatcccaagtagctagaccacaggaacgcaccaccacgcccagcttttcttttttttttttttaattttttgtagagatgaggtcttgctacatcacccaggctggtctccaactcctggcctcaaatgatcctcccccctcagcctcccaaagagctgggattacaggcatgagcctgcgcccagccagctgtaaaatttagaagctgaaacgccaactgggagcagtggctcacgcctgtaatcccaacactttgggaggccaaggcgggcagatcacgaggtcaggagttcgagaccagcatggccaatatagtgaaaccctgtctctactaaaaatacaaaaaattagcccggggtggtggcaggcccctgtaatcccagctactcaggaggctgaggcaggagaatcacttgaacccaggaggtggaggttgcagttagcagagattgcaccattgcactccagcctgggcaacagtgtgagactctgtctcaaaaaaaaaaaaaaaaagaagaagctgaaacaccacagcattagcccactactagctcaactcaattacaaagagacctctttaaaaactgaactataaagcaaatctataaagtttgamgtcaccaggcaagtaagaaaacatgttacggggaaattatctgaaaagaaacaacaaacaatgataaacatggaaaaccagagtccaagatcatcaaccgcttagattccacacagtagtctttctagggaaagaaagtagagtcttttttacagaaatgctgaagaagcaattcagaagaaacctaatgatttattaatgccttcgacccactctaccccttcctgtgagtctcctttccactggggacccagcagggcctagaatggatgatgctcatcacggctcactgaagcaggtggctgctcaccagcaactgatggaactgccaggcccctgggaaaccagacaccttctcctgctaggagtgaagcaacttcctcactgactgtgacagccatggccttcctctgagtctgcaggtgaccatgtctgctcctagaattctatttccttgactggtgccatgtttgtttgtttgtttgtttgttttgagacagagtttcgcttttgttgctcaggctggagtgcagtggcgcgatctcggctcacgtgaacccgggaggtggaggttgcagtgagccgcgatcacgccactgcattccagcctgagcgacagggcaagattacgtctcaaaaaaaaaaaaaaaaaagaaaaagaaaaaaactagtgataagagctaacatttattaagcactaatcaggaaccaggctttcagtttagcactttgtatacattattatctcatctaattctcacaacgactgtatgagattggtacaattataagtttctttttacaatgagaaactaaacctaagagaagttaagttgcccaaggccacacaactagacctgggaatcaagctccaaaccaatttctcaaacccctggggcttcctgccatagtctcacaggacctcacagtttctataagaatgattgaatatggtgtttctgtgtgattctactgcaaagaataatcagtataagcattttctggataatcaaaagcagtgattctcagtatgggctacacattagaatggcctagaaagcactgtaaaaatactaatgccccatcctgagagagatttcttttttttttttttttgagatggagtctcactctgtcccccaggctggagtgtagtggcgtgatcttggctcactgcaagctccgcctcccgggttcacgccattctcctgcctcagcctcccgagtagctgggactacaggcgcccaccaccacacctggctaattttttgtatttttagtagagacgaggtttcaccgtgttagccaggatggtcttgatctcctgacctcgtgatccgcccgtctcggcctcccaaagtgctgagattacaggcatgagccaccgcgcccggcccaagagatttctaatttacttctgtttttatgcatataccaaagtgatgccaggggcccagtgcagcagctcacgcctgtcatcccagcactttgggaggccgaaacagatagatcacttgaggttgggagttcaagaccagcctggccaacatggtgaaatcctgcctctacaaaaaatacaaaaattagccaggcgtggtggcatgcacctgtaaacccagctacttgggaggctgagacatgagaatcgcttgaacctgggaggtggaatttgcagtgagccgagatcacaccacgcactcccagcctgggcaacagagtgagactctgtctccaaaaaaaaaaaaaaaaaaaagtgatgtcagggttgagacccactgatatctggataagcagcttgcagcttataactgaatcttagtcacaattgttagtacaaccatttcagtttgtgtttatgctgttcaccttggctcttgccaagcaaaaccaagtgaagtcatatcacagtgcctaaagacgaaccttctcaaaagtttttggaaaacaaggcagaattgtcatctcactccatacagtgctgaaatcaaagaatatccacccaagcagtcagtaccatgttcctttgcaagcagcaacttcattacagaaaaacatcttccatcgcattaaatcagcattgttcatgtgaatgttattagtttggtaattttgtttgtattatatttataaatggatactggttttacagttatagaggagcagtaaacacaaaatattcacatctagtgtataattatagtaataaaaataatttcaaacaccactgagggtctgtgagaattttttttttttctatttttttgagacagagtcttgctctgtcgcccaggctggagtgcagtggtgcgatctccgctcactgcaacctccaactccctggttcaagcgattcccctgcctcagcctcccgagtagctgggattacaggcatacgccaccacgcctggctaatttttttgtatttttagtagagatggggtttcaccatgttggcca

SEQ ID NO: 93965 - DNA, 36662 bp, Homo sapiens
  misc_feature (1)...(36662): n = A,T,C or G
cttctattaagcacttcatctgctccactcctctccatcctctctcctggactgctgccccatcctcctccttatctcctctcctctgcacacactccactctggcttccagagagaattttctgaaatgtttacaagttgtggaggcatcagacccagggtggaaaccccagctctcactgtgtgtctttggagaaaggactttgcagctctgaggctcctctccccaagtgaaaaacaggagtaaccagagcactgtgagagtccacctcgtaaaagtcattgtcattgactgatgatgattttggtcttctgagctggtttgtttgtatcattctgtaccagatgtcactcactgaccccattctagatgcatggtctccaaccctagcagggaccttagtattcctggcaatgacacaacacagtgtctgatccaaccaagagtctgatccaaccttccccctctcctcaagctcctgcttcacccctacattccaccatcctgcctcctgcttgctggagcagccacagctctcgaggctgcagtcccccatctcctctgacaggtggacagaattctgcctactctggtatcactgcggatggctcacacacaggtgcagagcaaacatctcacagcactggaatgcatccagctccatcctacctcttgcaaccaggttagcaaggacacaacagtggagacaaaatatacctagaacagggtttctcaatctcagcactcgtgacatttgggaccggatcattcttcatagtgggagctgtcctgtgaattgtctgacatttagcggcatcctttacctcaatccctcaaatgctagtaggaaaatcaccccctccccacaagtcctgacaaccagagtatctctggacatgaccacatgtctcctgggggccacaatcacattcacttgaggaccgttgacctataagctgcaatgggtacctgggctggctgaacagccaggtgctctgtgtgggaaaaacagaccccaggcagccacctaagcctgagatctctctcttccctgtctcctcagttctgcaccccaaccgccggctgggcagctccatccacaactctctgactctgcccttgtacccatatcctcttggttcccctccacctggggctgccttcaatcaagtggccataaggcaaatgcagaaaaagcagccttttaaggtgttttcagggggtacctgtaggcaagtgtaggagccagacaaaggcctccttaaactggtgctgtgagctttattcctgcagtggccttcccagcaggtcattcccatgggcctccccaggaaaccaccctggaagggctgtcctctgggtctggaggggccaggaggagcctcagggggcgttcaggaacctgcagcctccacctcttcctccagcacacaagggctctctgcccagggaggctttagctcctgcaaaggatgggaagattccagtctcaaaggagataggactggagataattctggttaaagattaataaggaagggacatactgaggcatagccgacatcccctcccatcatagctgggaactcagtttttaagatttctcttgggtttccatgttcaagagggttcaagtggtactcctgcctcagcctcctgagtagctgggattgcagatgcccaccaccatgcctagatactttttgtatttttagtaatttttgtatttttagtagagacagggtttcatcacgttggccaggctgttctcaaactcctgacctcaggtgatccacccacctcggcctctcacagtgctgggattacaggcatgagccaccgtgctcggcccataaacttctatactctaagcttaaaaattattcatgctagagtttatttatacaaatatgacagatagaagtgtatgcatgtgtgcactgttcacctaatttctgtgaaaatcttgcagacatacctgctgttctgtacctcaatcccttagcctcatatcttgcctcccttgacatgtgtgtacatagaggaagatgcattttaaatgatcccctttctcattgatttagaactggttgagtttgaggctcatttccgtagagtatctaccctctaatattctgtaaagcagggacccccaacctccaggcagcagactggtactggtctgtggcctgttagggactgtaccacacagcagaaggtgagcggtgggcaaatgagcaaaacttcttcggtatttagagtcgctctacatcactcgcattactgcctgagctcagtaatgctcagtcagatcagtagcagcattagattctcaaaggagtgcaaaccctactgtgaaatgcacatgcagggaatctagattgtgtgcaccttatgaaaatctaatgcctgatgatctgtcactgtctcccatcaccgccacatgggatcatctagttgcaggaaaacaagcacagggctccctgattctacatgacggtgagttgtataattacctcataatatattacaatgtaataataatagaaataaagtgcacaataaatgtgatgcacctgaatcatcctgaaaccatctttgcctctcctccccctgctgcaacttgtggaaaaattgtcttccacgaaactggtccctggtgccaaaagggttggggaccactgctgtaaaggcagagtgtgtgtgtgtgtgtgtgtgtgtgtgtgtgtgtgtgctgaggtctccatgttgggggacattcaagcagagactctcatggatgcagtagctgggctgtgtagagctcacttcttcactagatgggaggctgggctccacggattgttcagttcccagaaccagaacagctggcatctcccctgcaagaatccacctgtgagtctgccttaacacctaacaggtgttcaaattttctgttactacttcaccacagataactcttctggattcaggccaagcctcctgtgtctaggaggttgctcccctagccataatctacagccaaagagaacacgtggtgaggacaggctggacctttaggtcccttctctaatacagtgcaaggccatgtctctgccccctgtgggatccaggtcaaaccccatatgcagcttacacagcaactgcaacaacagcaggaacagtgagttgcacttgctgaacctttagtctgccttgtgcattttgcatgcattgtctttttaagtattatgacaaccatgtgaggtgggtgctgctgaaacgcccatttacagacgtgaaggagcacggcccggtggtgagggtagcacaatgtgaggctgggtgggaggtctgggtgtatagcccggctccaccagctgtgcaactgtgggtggtcacttaagtatcttccaggcttaatgtttcatttgtaaaatgaaaaacaaggtgactaatatacttaaaggacttaaaacaggctgtgtaggttatgtcggcaaatggtggtggccaccattcctgctctaggctgcctgctcatcccaggcacacaggtggtctacagtgtgccaaacccctctagccactgggagcgctttcttctgtgtccctataaccccgcctgttcatcaaactctggctttgctccctgagcctaacagggatggaactgccagtaggtgaggtctgtccttgcagagggagtagggattttgggggatgcaccctaccccactgaggctgtagggccaggagcctgaatcccctggctgattgagctggcagtggtggtggggtgggggaggctttggggctccccaacacccagccagtgtcaggagcactgtcttccctgccctcctgcttagcagctgtgctaggagccccatccttcaagcaccccctcacccaagtccacccggcagggcaattctggacaggatacaaggagggccaggaggggagccctgggtctgttgggtggagcatccggggtgtgggaggaggagccaggtgctgattcaaagacctcaagatatttcccctctgggaccatgacattgcctgagattcctccatttatacaagtccctgtattaatatggcattgaccctaatgaatgggtgcagaacagcatggcagaggaaaaaggtttgggcttgaggatctcacaaacctggcttcctgtgagctctgtaacttgggctagaggcctgccctctctgagactcagtttgctcttttgttaaatggatgcattcccttctctggatgccatcactcaggtctctccaacaatcccagggctctggctcagagaaccgaggggaggttggtgtgaaggctttgggcatggtgacgcgggtgagcatctgacatgagcaggtgcacttgacctagagtaggtggaacacagtaggcatgctttacctagagcccctgccacatagtaggagtgctttgtggagagtgccttgcacacagtaggcattctttatgtcaagaactttacatagagtagttttactttatgtggagcacttgacacacagaaaaaacactttatatagagcatctggcacacagtaggtgtgcattatgtagagtaccggccacacagagtcagagtttatgaagagtacccagcatccagagtaggcacgctttatgtagagcacttgacacacagaaagaacactttatgtagagcatctggcatacagtaggtgtgctttatgtagagtaccggacacatggagtcacagtttatgaagagtacccagcacccagagtaggcacgctttatgtagagcacttgacacacagtaggtgcacttgacatagatcaccaggcacgtagtaaacatgctctacatagaacatctgacacacagtaggtgtgttttatatagagcagcaggtgcagagtaggtacactttacataagttactccgcacaaatttcactttatatagaggaccgagaacaaagaagcaagattttctgtagagcgcccagcacacagtggacacacttttcatagagcacttggcacacagtacacaacatgtatacagagtacctggcacatggtaggtgtgctttatttagagtccagtacacagtaaaataactttgcatattgtcttttgcaaagagcagagactgacacacagcagctaaagtgctagctgccagccccttcccttcactccctcctcagaatctttcatctgtccccatctaaggcccattttcctgtgatccctcctctgtccccctctaaggccttatctgacatcccatttcccagatgggaagcctgagtccaggaggggctcactacccacagttagggcaaggggagggcagaataaggactccactcagggtcccccatctctgccctcctgtccctggccccatccactcatggcccctctcagccttacctcccatctcccctctctgtcctcctatgctgaacctagcctccaggtattctcctccagcggggctctttatctctaaaatctgaccgggtaatccccagcacagttagatagtttgttcctactcctgtcagtcatgtctcgacccaggccctgggttgcctggaggcaggacttgaactcctgccagactgtgaagccagaggccaggagcttctgtctctgaatctcctaagtctgcactgagaaatggtgcatgatgaactcctggaccacatgtggagaggagctcagaacatgatctggcacaatggttggcctggccccactctcttgccacctgaactctcaagttcatgactttatctgccacactcttgccttggaagggcaaggtggctgtaaactttggggctcagagtcacctttgactcttcctcaagatcccctcccactcaggtgtgagatgttgagacctgcggatcctgtgcccatgctgtgtcaccctgagctggctcctctgcacccagctggccctacgccaggttttggttggttgcccaggcttggaagacacacycagtccatggggattggctcgaccagcccagcccagcctcgcctcccacagccttccggaaatcaggggccagaggcaaagacctcctagcagagggggagaggagggtatgtgggacaagctgcttctgataggagccaggctggcagtggcagggctggagggtcctggcctgggatggggaggggactgcccaaggttggggtgggtcaaggctgctggcctgggagactggtgatttcctggtaactggacccstggcaacctcccagtgattcaggctgggcctttttggattctaatcagcctctctctctctttccctttctgtgtaactggaggccacttggctgctggttttcattgggcatttctggactttagatctcagctcttgtttacccatctcagagccttccctgatctgcctccagcactgcccatccttgcccctytccactgtccttggagcttcctgggcccttccctgggcctcaggatcccaccctccatcccgtctgccctgcaggatgccgcagctgagcctgtcctggctgggcctcgggcccgtggcagcatccccgtggctgcttctgctgctggttggrggctcctggctcctggcccgcgtcctggcctggacctacaccttctatgacaactgccgccgcctccagtgttttcctcaacccccgaaacagaactggttttggggacaccagggcctggtgagtttgtcagcaggacgggtctggggtctcaggatgcatggagttcctgaggggcaggaatggggctcagggagctgggttttgagggtggctggggtgtgggaacacagagaagagagggagnnnnnnnnnnnnnnnnnnnnnnnnnnnnnnnnnnnnnnnnnnnnnnnnnnnnnnnnnnnnnnnnnnnnnnnnnnnnnnnnnnnnnnnnnnnnnnnnnnnnnnnnnnnnnnnnnnnnnnnnnnnnnnnnnnnnnnnnnnnnnnnnnnnnnnnnnnnnnnnnnnnnnnnnnnnnnnnnnnnnnnnnnnnnnnnnnnnnnnnnnnnnnnnnnnnnnnnnnnnnnnnnnnnnnnnnnnnnnnnnnnnnnnnnnnnnnnnnnnnnnnnnnnnnnnnnnnnnnnnnnnnnnnnnnnnnnnnnnnnnnnnnnnnnnnnnnnnnnnnnnnnnnnnnnnnnnnnnnnnnnnnnnnnnnnnnnnnnnnnnnnnnnnnnnnnnnnnnnnnnnnnnnnnnnnnnnnnnnnnnnnnnnnnnnnnnnnnnnnnnnnnnnnnnnnnnnnnnnnnnnnnnnnnnnnnnnnnnnnnnnnnnnnnnnnnnnnnnnnnnnnnnnnnnnnnnnnnnnnnnnnnnnnnnnnnnnnnnnnnnnnnnnnnnnnnnnnnnnnnnnnnnnnnnnnnnnnnnnnnnnnnnnnnnnnnnnnnnnnnnnnnnnnnnnnnnnnnnnnnnnnnnnnnnnnnnnnnnnnnnnnnnnnnnnnnnnnnnnnnnnnnnnnnnnnnnnnnnnnnnnnnnnnnnnnnnnnnnnnnnnnnnnnnnnnnnnnnnnnnnnnnnnnnnnnnnnnnnnnnnnnnnnnnnnnnnnnnnnnnnnnnnnnnnnnnnnnnnnnnnnnnnnnnnnnnnnnnnnnnnnnnnnnnnnnnnnnnnnnnnnnnnnnnnnnnnnnnnnnnnnnnnnnnnnnnnnnnnnnnnnnnnnnnnnnnnnnnnnnnnnnnnnnnnnnnnnnnnnnnnnnnnnnnnnnnnnnnnnnnnnnnnnnnnnnnnnnnnnnnnnnnnnnnnnnnnnnnnnnnnnnnnnnnnnnnnnnnnnnnnnnnnnnnnnnnnnnnnnnnnnnnnnnnnnnnnnnnnnnnnnnnnnnnnnnnnnnnnnnnnnnnnnnnnnnnnnnnnnnnnnnnnnnnnnnnnnnnnnnnnnnnnnnnnnnnnnnnnnnnnnnnnnnnnnnnnnnnnnnnnnnnnnnnnnnnnnnnnnnnnnnnnnnnnnnnnnnnnnnnnnnnnnnnnnnnnnnnnnnnnnnnnnnnnnnnnnnnnnnnnnnnnnnnnnnnnnnnnnnnnnnnnnnnnnnnnnnnnnnnnnnnnnnnnnnnnnnnnnnnnnnnnnnnnnnnnnnnnnnnnnnnnnnnnnnnnnnnnnnnnnnnnnnnnnnnnnnnnnnnnnnnnnnnnnnnnnnnnnnnnnnnnnnnnnnnnnnnnnnnnnnnnnnnnnnnnnnnnnnnnnnnnnnnnnnnnnnnnnnnnnnnnnnnnnnnnnnnnnnnnnnnnnnnnnnnnnnnnnnnnnnnnnnnnnnnnnnnnnnnnnnnnnnnnnnnnnnnnnnnnnnnnnnnnnnnnnnnnnnnnnnnnnnnnnnnnnnnnnnnnnnnnnnnnnnnnnnnnnnnnnnnnnnnnnnnnnnnnnnnnnnnnnnnnnnnnnnnnnnnnnnnnnnnnnnnnnnnnnnnnnnnnnnnnnnnnnnnnnnnnnnnnnnnnnnnnnnnnnnnnnnnnnnnnnnnnnnnnnnnnnnnnnnnnnnnnnnnnnnnnnnnnnnnnnnnnnnnnnnnnnnnnnnnnnnnnnnnnnnnnnnnnnnnnnnnnnnnnnnnnnnnnnnnnnnnnnnnnnnnnnnnnnnnnnnnnnnnnnnnnnnnnnnnnnnnnnnnnnnnnnnnnnnnnnnnnnnnnnnnnnnnnnnnnnnnnnnnnnnnnnnnnnnnnnnnnnnnnnnnnnnnnnnnnnnnnnnnnnnnnnnnnnnnnnnnnnnnnnnnnnnnnnnnnnnnnnnnnnnnnnnnnnnnnnnnnnnnnnnnnnnnnnnnnnnnnnnnnnnnnnnnnnnnnnnnnnnnnnnnnnnnnnnnnnnnnnnnnnnnnnnnnnnnnnnnnnnnnnnnnnnnnnnnnnnnnnnnnnnnnnnnnnnnnnnnnnnnnnnnnnnnnnnnnnnnnnnnnnnnnnnnnnnnnnnnnnnnnnnnnnnnnnnnnnnnnnnnnnnnnnnnnnnnnnnnnnnnnnnnnnnnnnnnnnnnnnnnnnnnnnnnnnnnnnnnnnnnnnnnnnnnnnnnnnnnnnnnnnnnnnnnnnnnnnnnnnnnnnnnnnnnnnnnnnnnnnnnnnnnnnnnnnnnnnnnnnnnnnnnnnnnnnnnnnnnnnnnnnnnnnnnnnnnnnnnnnnnnnnnnnnnnnnnnnnnnnnnnnnnnnnnnnnnnnnnnnnnnnnnnnnnnnnnnnnnnnnnnnnnnnnnnnnnnnnnnnnnnnnnnnnnnnnnnnnnnnnnnnnnnnnnnnnnnnnnnnnnnnnnnnnnnnnnnnnnnnnnnnnnnnnnnnnnnnnnnnnnnnnnnnnnnnnnnnnnnnnnnnnnnnnnnnnnnnnnnnnnnnnnnnnnnnnnnnnnnnnnnnnnnnnnnnnnnnnnnnnnnnnnnnnnnnnnnnnnnnnnnnnnnnnnnnnnnnnnnnnnnnnnnnnnnnnnnnnnnnnnnnnnnnnnnnnnnnnnnnnnnnnnnnnnnnnnnnnnnnnnnnnnnnnnnnnnnnnnnnnnnnnnnnnnnnnnnnnnnnnnnnnnnnnnnnnnnnnnnnnnnnnnnnnnnnnnnnnnnnnnnnnnnnnnnnnnnnnnnnnnnnnnnnnnnnnnnnnnnnnnnnnnnnnnnnnnnnnnnnnnnnnnnnnnnnnnnnnnnnnnnnnnnnnnnnnnnnnnnnnnnnnnnnnnnnnnnnnnnnnnnnnnnnnnnnnnnnnnnnnnnnnnnnnnnnnnnnnnnnnnnnnnnnnnnnnnnnnnnnnnnnnnnnnnnnnnnnnnnnnnnnnnnnnnnnnnnnnnnnnnnnnnnnnnnnnnnnnnnnnnnnnnnnnnnnnnnnnnnnnnnnnnnnnnnnnnnnnnnnnnnnnnnnnnnnnnnnnnnnnnnnnnnnnnnnnnnnnnnnnnnnnnnnnnnnnnnnnnnnnnnnnnnnnnnnnnnnnnnnnnnnnnnnnnnnnnnnnnnnnnnnnnnnnnnnnnnnnnnnnnnnnnnnnnnnnnnnnnnnnnnnnnnnnnnnnnnnnnnnnnnnnnnnnnnnnnnnnnnnnnnnnnnnnnnnnnnnnnnnnnnnnnnnnnnnnnnnnnnnnnnnnnnnnnnnnnnnnnnnnnnnnnnnnnnnnnnnnnnnnnnnnnnnnnnnnnnnnnnnnnnnnnnnnnnnnnnnnnnnnnnnnnnnnnnnnnnnnnnnnnnnnnnnnnnnnnnnnnnnnnnnnnnnnnnnnnnnnnnnnnnnnnnnnnnnnnnnnnnnnnnnnnnnnnnnnnnnnnnnnnnnnnnnnnnnnnnnnnnnnnnnnnnnnnnnnnnnnnnnnnnnnnnnnnnnnnnnnnnnnnnnnnnnnnnnnnnnnnnnnnnnnnnnnnnnnnnnnnnnnnnnnnnnnnnnnnnnnnnnnnnnnnnnnnnnnnnnnnnnnnnnnnnnnnnnnnnnnnnnnnnnnnnnnnnnnnnnnnnnnnnnnnnnnnnnnnnnnnnnnnnnnnnnnnnnnnnnnnnnnnnnnnnnnnnnnnnnnnnnnnnnnnnnnnnnnnnnnnnnnnnnnnnnnnnnnnnnnnnnnnnnnnnnnnnnnnnnnnnnnnnnnnnnnnnnnnnnnnnnnnnnnnnnnnnnnnnnnnnnnnnnnnnnnnnnnnnnnnnnnnnnnnnnnnnnnnnnnnnnnnnnnnnnnnnnnnnnnnnnnnnnnnnnnnnnnnnnnnnnnnnnnnnnnnnnnnnnnnnnnnnnnnnnnnnnnnnnnnnnnnnnnnnnnnnnnnnnnnnnnnnnnnnnnnnnnnnnnnnnnnntcactcattcctctcctcactcactcattcctctcctcgctcactcattcctctcctcgctcactcattcctctcctcgctcactcattcctctcctcgctcactcattcctctcctcgctcactcattcctctcctcactcactcattcctctcctcactcactcattcctctcctcgctcactcattcctctcctcgctcactcattcctctccccgctcactcattcctctgatgtgccatcccaagtctttctcacctccctgtcctcccactccagcctgcttggatctttttcctgcctgtcttccctgtgttactgcacctctgagggtctcctgtgggagtggtatgggtgcacagagcaaagatctcctggcatttgcaccttctccactgctggacttgaggcctcctgagtctactgtccagggactactccctgcctggcccatttgcttgtgtctgcccatctctgtgctgctgctttctcacaggaattagctctgagcccctttccatacgcagggacacagagggtccagaagagaagtgtgggcagtctcccgctgcctccttttctggaggcaccttcctcctatcttgctcttcctcactaacatgtcccagtcggccttgttacctgcctgaataaaagttggccactcccttctcttttcagaagctgtccttgactccgcagaccttggcctccgacttagacctgctctcccatttgggggacatggccttggtctgctcacttgtaaatggcaaaattgatgggcgtgtccatyggtgcagtggagggtgaataggacacactagcacagagcctggcctgcaggaggtgcttactgtagacagttaagagtcactcctctacgcctgggggctgctgagaatggaatgtccccagtgtgggaggaacagccgctggtggggaccagccaggacgtgaaagggatgtaggaaccagcctcagggacatgtcctgaggccacactgctgtccacagacctccttccatgmggacttttccatgtggccatccccaggttgaaaccatttccaagacgagaaaacacatcctcttgagcagacagcttgccttctccctctgctttggtatttactcttggatcttttatttatttatttatttttgagacagagtctcactctgttgcccaggctagagtgcagtggtgcgatctcagctcactgcaacctccgcctcccaggttcaagtgattctcctgcctcagcctcctgagtacctgggactacaggtgtgagccaccatgcctggctaatttttgtatttttagtagacacggggatttcgctgtgttggtcaggctggtctcgaacacctgacctcaggtgatccacccaccatggcctcccaaagtgctgggattacaggcatgagccaccacgcctggccattatctttggatcttggagacagccccaagagagaaggagcaggggtcagctgagattctctgcagctgttcagaatccagacacgatgctcagggcagaggctgcaccacatctggaggctgcagggggaacttgatgtggctcctggtggggaggtgcattactcagggttctctttagaaactgaattgacaggatatcttcccgcttatatctcatgcatgtatgagacagagagagagagagagarcgtgagagagagagtttattacggaaattggaaaatgtgatgatggaggacaagaagtcccatgatatagcatctgcaagccagaaaccagggacactggwgttgtaaattcagtctgagtcccaaaaggcctgagaacctggagttctcatgtccaaggacaggagcagatggatgagcacatccaccctttcctctgcctctttgttgtatctgcaccatcaaaggattggatgacacccacccccactggggaggtggatcatccttcctcagtttacctattcaaatgtgaatctcttctggaaatacaccgatggacacatccagaaataatgttttaccagcatgttttatctgggcatctcttggctcggtcacgtggaattcatgrttaattcaggatgcctagaattaaccatcacaagggctgacggcctctgccttgttttcaggtcactcccacggaagagggcatgaagacattgacccagctggtgaccacatatccccagggctttaagttgtggctgggtcctaccttccccctcctcattttatgccaccctgacatyatccggcctatcaccagtgcctcaggtacccgtgcagagcttgtggtagtgggggctgggaaacatcaaaggccttctagcctctcccctccccaagcttctgtgtggcccctgcagggcccaggcccctcttcctgcttctctctcagccatgttcctctttccttcatgtattcacgaaccccccatgtcagcgtctcctccctccactgccatctctctctgcctttgtgttctgggcaccactggggctccaaraagcctcaatttagggccctgtcctcgagaaagccccrtgcttgaggaaatggatctggacagagacatctcaaacttcgtggagtcaggaattggcaagaaggagatgggtgtgacaactgggagaacaaggtctttcctgggggcagattggaaggcttcctggaggaggagttgctggaaaaatgagtaaaaagattttaaagcaaggggaagggtgatgcagtggatatcattagtatccaggtaccgctgccaggcctggcatcagccttgtctgtccctaagcctatggtactagggggatttgaggctggtggagaatctgggctgctatttatgtgatgttcaagtctggtgagtttattccttttacctcatcctgtcactcatccaccctactcatggctctcctgctccaggccccagcaatctccagtaggagatcccaccccagtctggggccctttctttacctctgctcatcctgtgcttgaacaggccagactaagcaggggcaggggaagcatcccacagaaactatggctataacctcaggaggctgagtgactctgggcagctcctcagctctctctggctgctgaagtctctttcagttgcgagtgatggaaactcaaactcatgtggtctaagcaaataaagagaatcaatgtgctgtaagtcaggggagagtggtcttcaggcatggttggatccaggtgtcaattaatccacatcactgggaatctgtctccttctctcgattttaccattctctgtgtcactttgccttttcatatggtgtcaacgatgagtctcagaagcccagttccaatcagaaagcccacctttcttccaagggtcccatatatagcctatgttttctacattatatttgattgtatctggtatatgcttccacctgggatcatatacagaagtcatcatgtgtggggctcagttgtggctgaggacatttggggcatgtcagagtctttttggttcttgtctgagatgtagtgtgagattgtctttttattctacttcaaatgtcttggccatgtttggtgcttgtccaaggtgtaggacccagggaatctttgagaactgtctragatattatttgagtcttagtatagttaggtcttagggtagatttgaattatgccgaagaataggcttggttatacccgggccatgtttaggacattagtgacatcatatttaaatgttatctaggacccttcactgggatacacagaagtcatatcagaccatctcaggtccatggcagagcatgttgtgtcatttagggtttgtcatatgtgttttggccatgtcagggaatgttaacaactgtcggggcaatattccaggtcccagatccatgtcagaagatagcagagagtgctgggagtagacagagtgtcctaggtccctgtaaaggcattctgtagagtgttgagctatgctcaggtgttgcagaacatgttggaccwtgtaggagatatgtcaytgtgtgctggggcatgctgtgttattgctctactctgtcgctgcagcctggtctggtctctccttcctccaccatcctcccttcttcctctacccttggccttcttcctgctatgctgggtgggatgmgtggaagtgcacacccctggctggsagcattcctccatacccaaagtccttctctyacccctctccatggccactgatggtcctcaatcatgtcagctgctgtcgcacccaaggatatgattttctatggcttcctgaagccctggctgggtgagtaattgaggtgaatggggttggggatatcctttaggkataagggagggtgctgcccttgaccactgtccttggttgccctgccaggggatgggctcctgctgagtggtggtgacaagtggagcygccaccgtcggatgttgacgcctgccttccatttcaacatcttgaagccttatatgaagattttcaacaagagtgtgaacatcatgcacgtgagtcccttgaactctgggtcccagctggagccttggggtagagggaccacaggcatatctgctctggaattttggttgtgctttggggacaatgctcttcctctctgagccttggtttccctatctgtaaaatgggaataacaatctctacttaaaaggtggtaatggattcatgtccccagcacatagtatgtctcaaaaggtgtgagtttccatgcttctctcacagaaatccttcaaactcaagagagtaaagatcaagattgcatagtagcaattgctgagtacaaaccgcctgaaaactcattggtttagagcaataagggtttattatacttaacaagtgtgtgagacttgttaataaccagaagagactggttcttctgcatgtggatgggatcactcttggtacatgaacagctgtgggtcatgtgggcagctttgctgatcctggctcagtttattcacatgtttgtttggggctttgctagctttaggctgacctgggatggcctcagctgtgacacctggacttttctccatgtgtttctctgcctccaggaggcaccctgctgttcacatggcacagactgggttctgagagactgccaggagactgcaatgtctctggacattttctctgcaatgtttcaaagttcaaccaggcttaggtcagcacagactcaaagggtcataaaacagtctccatctcttaatagaagttgctggaaatcacagtgcaaagggagaagtgaagaattgggagttgggattttgtggtgtgcttaggatgtttttcttaattgcaarctgataagctagctttgttaatacttcatggattctgcaaggagatacgagagtcctgggtcagagacaaacagcaatttattactcacggcatagcaagcagcatgttcttggtttgcataatttctccaaaccacttaaatcccacggggtgccatagagaggtttgaatagttgcctgcttatgcagtacggtgcatggaaggaaaggagcactaggsttagggaatctgctttcttttttttttttctggagtctcactctgtcactcaggctggagtgcagtggcatgatctctgctcactgcaagctccacctcccgggttcacgccattgtcctgcatcagcctcctgagtagctgggactataggcgcccatcaccatgcccgtctaattttttgtatttttagtagagacggggtttcaccatgttagccaggattgtctcgatctcctgacctcacgatccacctgccttggcctcccaaagtgttggaattacaggcatgagccactgcacccggccgggaatgtgcttttttagcaagcagaagcaagcctgatatgtgtccaggagcagtcattgccttatctctcaatgttgttctctgcaaacacaattctgagaaacggcccaaacaactacagggtgtgtgtgtgtgtgtgtgtgtgtgtgtgtgtgkacatatatgtatatatatatgtgtgtgtatatatatatacacacacacatttgctttaagttctgggatacatgtgcagaacgtgcaggtttgttacgtaggtataaatgtgccatggtggtttgctgcacccaccaacccgtcatccaggttttaagccccacatgcactaggtatttgtccttatgctttccctccccttgtccccaaacccctgacaggacccagtgtgtaatgttcccctcccaagtaatagggatatttttgaaatgaatttatagcaatggagatgagtaaaaccaacatttactgagcactcaccatatcccagaaacagtaccatttgccaactccatgatacatatttaggaatttaattttaataaccccatgaggctttggttggttttgccctgttgcagactatgaaactgaggtccagagagattagggagtttgccaaagttcaaccagatagtaagtgagctacgagtggtggagcagtgattctgtcctggtttatctggccccaaagcatgttgccctaactgttactgaagatttgatagatgggacctatgggagtgcaggaggttgaccaagagcacacagaccataggaggctgaactgggacttgaacccagatctctcgactcccagccatgagtctttatctcctaatagtaacagtttctgctcctatccaaggctggtccttcctggggatgggtacctggggcagaggaccaggaggatgattgcagggagtccatcttgatgtttgggtctgggaaggtgctcccaggaggcagttcccagctttggctctgttttttctctggccaggacaagtggcagcrcctggcctcagagggcagcgccagactggacatgtttgaacacatcagcctcatgaccttggacagtctgcagaaatgtgtcttcagctttgaaagcaattgtcaggagtgagtcctttcctaggacctgagaacttgggcctggaacccaagggagtaggytggaaaaggatggctgacygggrtaaccagaagtgcctttctraaggcactttctgtgtgtcatagctgggctttgaaggatggggagggggaaagagacagtagacatgaggttgtggaagtagacaggggatagatttcaggacattgaaaatcaggaaaagtggcatgaactttatcaggaggttcccaggaatcttttgaagagggttgggcygatgacagatgtggtcacagctgagctctgtggaggtctgcctgtcatgtagacgctacatggagcagacattgaatgcaagtctgttatggtgggggctgggtcagaaagagctggaagacagtgaggtctgagttttgtgaacagtttttggaaggaaaagagtgcaggctggacactgggtgggagagacgggagagaagcatggtgtccaagctatgctctgggtaccttggtgcatggaggcagctctcagagatggaatgcctcagagaagagagtttggagagtcaagtctcctggctgtttctggatactcaatttcctgatgggcagtagcttctagctgctggtgagaggtgctcctgggactttgcatatgttaagttgttacctccttcatgcaggaagcccagtgaatatattgccgccatcttggagctcagtgcctttgtagaaaagagaaaccagcagattctcttgcacacggacttcctgtattatctcactcctgatgggcagcgcttccgcagggcctgccacctggtgcacgacttcacagatgccgtcatccaggagcggcgcygcaccctccccactcagggtattgatgatttcctcaagaacaaggcaaagtccaagactttagacttcattgatgtgcttctgctgagcaaggtaggcttctctgggatgtgaattcaagtaatagagtggagatttatgcctctgtcaaatgaaagaacttggacttgatccaaagggcactgggagccatggwacatgcttgaaaaagacaggtcagagataggtttgagagatgactctgtggaattcagctggcaggggactgctaagtttgaaatagtgaggagcctgagattttactctacttacatgttagcaagttaggctgacatatttttatgcatatctatctatgtctatatctatgatgacagatgcaccaaatccctggatcacagcagcctattcatcattcacagcaatagcagcaaccagagtaggattgtagagctggctctctattcccatattccttctagggtaatgcaatgtttttacctgtaaatacaccagaatgcactgcagagaggggccccacagtatacatcttggggcttatataggatagctagctagcacatctgccccttcttccttccagggcgagagtgggaatgagaaagagagagagagagagagagagagagagagagagagagagagagaggatgtttgctttgttctggaataaaaactactcctttccagtgagatcgacatgcctgtaggtttataggtttataacccagatgccttctggaaagataagaagtattctctgagtttaccactctagaatgtgagcaaatacattcagagtaatacttcagttctttctttctttcattttttttgagacagagtttcactcttgttgcctaggctggagtgcaatggtgtgatcttggctcactgcaacctctgcctcccgggttcaagtgattctcctgcctcagcctcctgaagagctgggattacaggcatgcaacaccatgccaggctaatttttttttttagtagggacggggtttctccatgttggtcaggctggttgcgaactcccracctcaggtgacccacctgcctcggccttccaaagtgttgggattataggcgtgagccattacgcccagccaatacttaatttctaacctccaagtgaaattgccattgaaatatgctgtaacccaggttgccagttaatgctttactccaaaagtcctcattattcraaacaagaaaatatccataggtcattgactcttcccagcagggccaaataggaggtgaagaagccagcgggaagcctgtgggtggtgggctctgatggtggtgacmaagagacatctaggagtgcatgatgggcttgggtttctggaaggaggatggatcttcagaaattatcttaggtttgactcaagagccttcagagctggtgtgatttggggcagggatattgtcttgccttctctccaggatgaagatgggaaggaattgtctgatgaggacataagagcagaagctgacaccttcatgtttgagggtgagggtctcagtgtgggactacggtggggacaggggcctctccatcccaggaacgtagtgggtrgaccctggatcacttaattctgsccatcctcctcctccctacattctcctgagggcctcagagtttgggtgctctcctccctctggtgctgaagcagcccagaaacccagttttgcttggctgcccctcaggccatgacactacagccagtggtctctcctgggtcctataccaccttgcaaagcacccagaataccaggaacagtgccggcaagaagtgcaagagcttctgaaggaccgtgaacctatagagattgaatggtgagtgcaggtgctggcctgttcctgatcttttgtcattggttctgctcctcaggtgggcagagggagggagtttttttggtcaattcttccattatcgcttagtgggaatcggtgcaaatctcagaggcagggcttaatacacagccmggccagcaggggatggtttgcaggcttttgggacctgggctgctgggagaattggtgacagcatgtgaaggcagatgatgccacttagcatgtgttcagcaaatgaatttctcctccacctcctcttttcactgaattatcatgttttttcaaacatcttcactttctgaatgtttgctcttccttaccctaatttcaatcctgttgtacagtccagggatttataagagagacctgagggtaaaagtcattcattcctatccagaacacctgcattgttcatccatccagtcttcattcagcaaatgctcccacactgtattcctatccccagttttgtatctagcacctttcggtgctctggagagcttggaagaatccagccctgcgatctgttttccaggtgctcccagcctggtgggggaacagtcccaggacaggaaactcccagcccacatgggcagggatgaggctgagaacaagagaagcatgactggaggtacagaaagtgtctcacccggccacagtggctggcacctgtaatcccagccactcaggaggctgaggtgggaggatcacttgaggccagtacttcaagatgagcctggacaacatagtgagaatttttctctaaaagacatgaatagatgaaaataaaagtgaggtgtctcagttgagatccttaataatgatcagtagatatttggatgcagtagggctctaggtcaagaagagagcctaggcaaaggtcgagggaggagagagggagtgagagagagagggagagagagagagagagagagacagaaagagagagagagagagaccaagagtgagagaaacagagagagagaagagaaagaaaagagggaaagagagaagtggcttgtgtgcagggggagggagaaggtcataaaaagagaatggagagagaaggaaagcaagagagaaagaaagagagagggaagacagaaacagagagaygaatagagagggagaaackgagtcatgatgagatgatgaacctggagatggcagcagagcctgggtgtggaatacatggaaaaaaaagtcaagaacttcaattttaactcaagggcaatgggaagrgacaggtagcaggagaatctttttagggctagtgtagagggcatactggagaggaccagttgtagaaggaagtcccagggaaggacattctgaggtctgagccaggccaggagctgrggatggagaggagacattgagctggacrggccttttgaaggtagygcccttacatccaagcctttgctcagcacagggtcctgtaaggtggagaaacatttttatgcttttaaaaccaagatttcaagcaaaattacacattgtttaaaaaagtgtccaaaaattttgataaaaaatgagcttccttcttaagcctcacactcctcactctggcagtttccatcatcaatggttttctgtgtgtcctagaaaaaggctatcctgatgcccactgtatatgaacacatgctctctttttctgtgtgagtaggagtacataaaatagacacaggtctgcccactaacaatgtatctttaccatcttctgtttttctcaaaatatgagttttggaaaatgagtttgttttttaatttgtctttatttttaattgacaaattttgattatatatatttatggggtacactgtgatgttatgatgtacacaatgcagaatgattaaatccacctgatggtcatatccattacctcatatasttattattttagcagtgagaacatttgaaattttctcttttagccgttttggaaaacataatctattattattaactgtagtcaccatgcatataatagatctcaaaactttttcctcccgtctaatggaaacttgtaccctttgaccaacatcttcctgttctttcttcctccctcctctggcaaccaccattttcttctgtctctgtgatttctatgtaacctattttagctctcacaggtaattgagatcatttgctatttgtcttcttgtgcctggcttatttcacttagcataatgtcctccagaatcatccatattgtcaccaacgacaggattcttttcattttaaagactgagtaccattctattttgcatttatacatggaaaatgagtgttgacttccaaaarcaatgatgagaacagattcttcttggactcaatgmgacactacagataagacagggtttaaccttgacattcccaccaccccacctaatatcctcgctttccctaaaggggtctcttgagacatcaatttgtcatctaactgtctgcttatctatctgtctrtctatctatctatctatctatctatctatctatctatctatctatctatctatctatctatacatctgtccatccgttcatccatccatccatccatccatccatccatccatccatchgtccatccatcctttatcctatctattcatccttcttgtctatctatctatctatctatccatccatcgatctatctatatcatctatttccatatatatactatgtattttattkatataaataggagtcaatgaaatatatacatatttatatattttaatatatattaaatttattaacatatttatttaatttaataattaggagtcaatgaaatgtatatatttcatatacatagaaatatatatttccatatatactatatatattcctaattattaaattataatgttattaatatgtttatttaatttaataattaggagtcratgaaatgtrtatatttccatatacatagaaatatgtwtttcatatatatatatactatgtattttgccctttgctatttacatgtatgcattttgtggcttatttttgccactcgacagtgtgtcttacagctgtttttttttttttagcatggcataacattccatattttatttgtttcacacctttgttgaaagcacttgtgtatctttccagttattgtagatatggccaatttgccttccagaatctctgtactgatttaccttccagcctgcattgtgtgacacagctagtgacctgtttcctccttttttgtagttgcattgtattctatggtactagcattctgttgtgtggatgtttatctaaacctctttccatcaatgtatatttagcttgtttcagacttttgctaaattaaacctgttgcagtcagcatgtgtgtacagtgaccattgcttatttgtgtgaatatctctgcaggacaaattcccaaaagtgcaattgcagaataaaaggccattttactccacaattttaataataataaaaaatctattcctattagctgagtttgatggcaacagctttcccataacttcgccaagagtattacattattattattatttttttcaacttttattttaagtttcaggctatgcaggttggttacataggtaaacgtgtgccatagtggtttgctgcacctatcaacccatcgccttggtattaagcccagcatccattagctattcttcccgatgctctcacctccccaacccctccctgtgacaggccccagagtgtgttgttccccaccatgtgtccatgagtttcccttgttcggctcccacttgtaagtgaggacatgtggtgtttggttttctgttcctgcattagtttgctgagaataacggcttccagctccatccatgttcctgcaaaggacatgatcttgttcatttttatggctgcatagtattccatggtgtatatgaaccacattttctttgtctggattatcactgatgggcatttgggttgattccttgtcttcactattctgaatagtgctgcaatgaacatatgcatgcatatatctttataacagaatgatttatattcatttggatctatacccagtaatgggatttctgggtcaaatggtatttctgcccctagatctttgaggactcaccacactaaatttttgtcagtctgcatatttcttcttttagtgaacgtttccttaaataagagtgggatagaacatctcttgccattttttttctttttgtggaagagatcatcttacattgctgttttcctttgggttattttcccatatttacttatgagactatgtgttaaaataaatctttttttctgtcttttgttgccttttgacttcttggggacacttttggttagtttatatgaagccaattttgtccacattttcttttgtagctgtactatccatccatttcccagggttttgtggggcttcctttaccagatgtgggttttcacttattcacatatctgtctctgagctccctattccattctttggtctgtttttctgttcttgcagctttgccatgctacatttgttactgtaactcagtaataggtcttaatgtctggtagaatgactttctcttctgtttttatttcagtaatttgggggtggggtacaggtggtttttggttacatggatgagtgcacctgtctcctaaacagtgtacactgtactcaatatgtaaccttttatcccttgcctccctcccaacgtccctccctgagtccccaaagtccattatatcactctgtatatttttgcatcctcatagcatagcttccacttataagtgagactatatgatatttggttttttattcttgagttacttcacttagaataatggtcccagctccatccaagttgttgcaaaagacattatttcattccttttaatggctgagtagtattctatggtgtatatatgtcacattttctttatccactcatttgtcagtgggcacttagattggttccatatccctgcaattgtgaattgtgctactataagcatgcgtgtgcatgtgtctttttcatataacgacttctttccctttgggtagatacctagtagtgagattgttggatggaatagtagatctacgtttagttctctaaggaatctccttactgctttccacagaggttgtactaatttacatttgtagcagcaatgtaaaagtgttcccttttcaccatatccacaccaaaatctattgtttttttgactttttagttatggttattcttgcagaagtagggggtatctcactgtggttttaatttgtatttccctgatgattagtgatgagcatttttaaatatgtttgttcaccgtttgtacattttcttttgagaaatgcctattcatgtctttgcctactttttgatggggttatttgattttttgcttgctgatttgtttgagttccttgtagattcttgatactagtcccttgtcagatgcataatttgcaaatattttcttccactatgtgggttgcctgtttactctgctgattgtttctttggttgtgcagaagctttttagtttaattaggaccgatttctttatttttgtttttgttgcatttgcttttgaggtcttagtcatgcattctttgcctaagccgatttgcttttctctaatattttattttcagattgagctagctctttatgatgtttttcttcccaaaaaagtttagagtaagttcatcaagttcctaaaagttagatagattatcatttgcactgaatatattctcttgtttgacttgaatatgtgattgatatgtgtgaaaacaggtaacatcataatattgacacatagtttgtcatagtaaaatggttattaatgtattcaaataatatttaagcttttaatagagcttaaaatatttgcttagatatcatatgcatgttttgttaaatcaatccttagatattttgttgctatggtgaaatgtatcttttattcagatagagggaaatgtataaattcattggaaatacagagactttacgtctcttgttaaaatttaattcagatattttatattattatcattattattaatatcttatcttttatctttttccagatgcttcttattttcctggaaaaaaaatcaactcaatctggttgccatgtcttataataggacaatgtttagattactcaagtatatagttttttttaaaggctgttaaaagctctagaagaaaccatgggaaaattattttatagcttcagagtagggataaccctattttgatacaagtcccaggagctacacaagaaaagactgacatactgttaaatgagaaaagatatggaatatgtgtatagtatatgatgtactcatatttttaagatactaaaaattatctctagaaagatacataaaaataataataacttaggcaacctgtgaggagaagaagcaggtgactttgggccataggggtagaggatgttttatagtttttaaatttagagccacttaagtgtacaatgtattaaaattttaaactgccacagaaaaagaagaaagattaagcaaacaattcagctcccttactgggtcttaaaygtttataaatgttttccagtgaagtgttctgtttttctaagtataaaatcaccgtctgccaccrccacatttcaaattgcattcctctcttttttattcccttgtctaattgcatttgctactatcgctaatacaatgatgaataagagcaaaacagtggatctgggtattttgtttcttattcacttgcattttgtgtttgctttcttaccataaaggatatttacctttaggccaatatgttaacctttttaatagctggcttcagagtgttgtgttttcctsagaataatctttaaaaaatcggcaccatttttttctggtacttttctaattttctgcttttctaatttttttctgctttttaaattctccagtatttcatccatgtggaatttattttgtgatagggagaaaaagtctcgcttggaaacagagaagctggagaattgtgtctttgttcccttgataatgattggggctggggtgttttcttagggacgacctggcccagctgcccttcctgaccatgtgcattaaggagagcctgcggttgcatcccccagtcccggtcatctcccgatgttgcacgcaggactttgtgctcccagacggccgcgtcatccccaaaggtgctcacagcctcagggggaggagcctcctgggtagcaagaggggtccctcaggcargggggccttgtcctgactgccctcttctctcccacaggcattgtctgcctcatcaatattatcgggatccattacaacccaactgtgtggccagaccctgaggtagtgcctccctcaccccaccctttttggagtccattccaaggttcctagaggaggtgacagggttttgaccaggaaaatccaacatcacctctcctcmatggagacacatctgccaaaatgtctctccaaggccgggggtcttggagacaactgggagaccccacccaactgggtgaccccacccagcaagccttcttggtctcacctgcaggtctacgaccccttccgtttcraccaagagaacatcaaggagaggtcacctctggcttttattcccttctcggcagggcccaggtaaggatggcctgtgtctgaggcagagatggcatgatgggtgcaggggtccaaaaagggggaagttacagatggtcccagttccagctctccttccctcccttcctcaggagttcatgggcaactgttcacagaatgggtttgggaaggtcctagaggggtctgcggtgtgctcagagtcccctccttcatctgtttatctgaactgggggtaggagcctgggccaggtttgggggatatgcaagcacacatgggagtcctgtggacacttatcccctctttctgcccctcaagcctatgtgggtgcgtttggggtcccaggccaggttctaagcatgayggggccgggatgggggtcatgggcacagtcagatyccctcacttttgcccccagaaactgcatcgggcaggcgttcgccatggctgagatgaaggtggtcctggcgctcacsctgctgcacttccgcatcctgccgacccacactgaaccccgcaggaaacccgagctgatattgcgcgcagagggtggactttggctgcgggtggagcccctgggtgcgaactcacagtgactgycctacccacccacccacctctgtagagtcccagaaacaaaactatgctgacacctctgcttgagcctcgttgacagccagcatggggctcctggggactggwgggatctaagaaagggaggtgagtgggtggaggcagggtgacgtctctgaacccaaaaccctgacggcctctctggctgagcacagggcatctaggcccttagtgggttctcccagagcccaagtaaaaactttatcctgtgggcagtagggagccctgggaggtgtttgagcaggagagggaacaggattaagaatgggtttaaggagcaagactgagactctgattcagcgagaaacaaccataggggcagatcccttcatctgtcctgggaatgtcctcccaagactggagtcctcagctcagaacaaagggaaaggggtgcagcttccaccctggcaggctctcagaaatttttagttcctttttccaccaacttcccacccctgtttctccccctcccagtgcgttctctctgtgactctcttcccttactttcagaggcataggatctggagccagactgcttgggctcaagtcctggctctgctgcgtgacttgagcaagttaattcctctctctgtgcctcggttccctcaaccatataatggagacaacagcattacctatatcagggttttcctgaggtctcaatataagggactcagagctgtgcctggcacacaatgaatgctaaatatatggagccattattatttcctgtctcagaaagtctggctgttaaagaatgttgtctttcaagatcgttatttctaccacgactttaaaggctgtgttttggaactcaaaggcaaaaattctaatatctgtgctccttgaacaacctcttctcctagagggctgtgcatataagatatgtatatatatatatatattatatatatatatatatacacacacacacacacacacacacacatatatacatatacacacacacacacacacacacacacacacacacacatatatatatatatatatttttttttttttcctgaggatggtgaaggtacctgactgtgtgaggtggtaggagaatgagagaaacctcagtcagtgtctcaaaataaaatcctgctacaaacattgatctcttttcatagcctaagggatgttgcatcgctaaaccctgttgacttctctaatctcttctgtagctgatctccttcccttgctacactcggttactctggccttgattctgatctccaaatacattatattttttatttgggaccatcgtattgcctttgcacctttatcaaatataagttgcctatatttatttggatctattttttgggcttttaatattctgttccattgacctatttctcttttcttttaccaataccgcaacatcttggttactgtagcttcacggtaagtcttaaaacttggatattgtcagtcctccaactatgttctactccttcaatattgtgttggttattctgagtcttttgtctctccatataaattgtagaattagattgctgatatccataaaaaaactttctggagggccccagggagcgcggggcgccgctgctgctgctgctgctcctcggctgggttgtgtctactgggcccgcggctgcggcggcagaggggcctgagccgggagccgcgctcagccgagagttgggcagagggagtgcccgcgccgccgcggcgtcatgggccccctcccctcacctcagcgggcaccagccgcgggaacccccgggcctcctcgcgcccgagcctgagcgacccctgggttctccggcgccccctccctccccctatttttcttttcctgctcttgctgaccctaccgcttctgttctccgttatggcaagagagccaccatccccgctccgggtcgaggcgccgggtcccccagaaatgcggaccccaccggcgatcgaggccacccctaagggcaccctgcagccggcaggcggcagactccgcttcctcagtggctgtgtgcccatcttgcatcaggtggccgggcacaggtatgggaaggacaaaatgggtatactgcaacatccagatggcacagttttgaaacagttacaaccacctccaaggggcccaagagagctggaattctataatatggtttatgctgctgactgtaccgatggtgttcttctagagctacgacaatatttgccaaaatattatggcatctggccacctcccgctgccccaaacgatttatacctaaaactggaaaatgtgacccataaatttaataagccctgtataatggatgtaaagacagggcaaaaaagctatgatcctttttgcctcatctgagaaaattcagcaacaggtcagcaaggacccattaatggaagagattgggttcttggtgcttggcatgagggtttatcttgttcattcccatagctatgagacacaaaccaacattatggaagaagcttaacaaaagaagctataaaggatggagtctccggattttttcataatgggtactgcttaataaaagatgctgttgctgccattattcagaagactgagaaaattctgcagtggtttgaaaaccagaagcagcttaacttttacgcaagttcattactgtttctttaggaaggttcatctcagccaatcactacaaaactgaatgacagaaatttggcagaaaagtttttgtccaaaggacaactgtcagacacagaagtactagagtgcaataataactttcatgtattaacttccacagtgaatggaaaaatagaggcttcagtaggcaaaagcttgtccaagatgtatgcccatcacaggaaaatgtatacaaaaaagtatcacagtcagacttcattgaaagttgaaaatctagagcaagacaatgggtggaaaagcatgtcacaggaacatttaaatggaaatgtactttcccaactggaaaaagttgtctaccatcttcccactggttgccaagagactgctgaagtgtgcatgatagatatggctgatatgttccttagcaacacagtagataagggatatgtttatgggctaaagcatttaatttctgtacttcgaagtattttagacaattgaatcatctgttgcagtattttttttttttttttgagacggagtctctgttgcccaggctggagtgcagtggcgcgatctcggctccctgcaagctctgcctcccgggttcaggccattctcctgcctcagcctcccgagtagctgggactacaggcgcctgccaccgcgcccggctaattttttgtattttttagtagagacggggtttcaccgtgttacgcaggatggtctcgatctcctgacctcgtgatccgcccgcctcggcctcccaaagtgctgggattacaggtgtgagccaccgcgcccggcctgttgcagtctttttaagaggtgggccaatcataatgaagaggagcaggcaatatctccgcacctttaatgctatgcaaaaaatatgtattgtgagtcgacattttatttgtctttatacttttggaagaaaggttaacttttttataatcttactcaggaaaatatatgttcattagaaaactatgaagaataaagaaacttaggaatgttaagcagggaatgtagtggtacatggcttaaacatcttttttggctcaagcaaaatgcaaaccattattcagtcattaagagtttagttagctttctgtaaccaattcatgaaatctctgtccacccaatttgacaatgagccatatctaaaataatacattattagaacacctaccaaaatctcaaaagcacaggttgatgtccttagtcttgctatgtatgaagttattaaaactggagaaaattctacttcagaaataagtactgcttaggttttatattaaaaattcagaccagcatatcaaaggatgcttcttagtgaaatgatttagaattgttgcattccaaaagcaggttttctctttaatttttacaactctctctctctctcaaaatattatacttcatgaaaaagacaattgacatggatgacaacaagagtcttgaaattaagggcacactcattgttcttaccagggttagaagagagaagttattttcaaggaacaaatattttgctttacaacctctcgtttatgagaaaattggaatataaatttattacattgtgaaaagtatcataaaccatatacctttttatctaaatgcagtttcaaaaaagtaaataattgaagttttatttctcctctaaataactggaatttttttctttaaaaatttatatatttatatgtccccatttagttaagtggtagtgtaaatgtatactgttaaaagtggtttctcagaattatagtaagcaatgaaagacagtatctaattaggttgttatcaaaaatactatgtgtgaataagtccatcatatagggctggtgtgtatctaaattcatgcttctatttcactgttactcaaaacagttttatattatgttgaacagtgaaattataatttaatttcatggggacggggcagtgctatagttcctggaaaaattagatttgtattatctttatttcacacctaccaccttagaaaaatcaactagttgtcattgaaaacatttaaaactttgagtcttcaaatacatttgatgttaatgctgtcattacttgcactttgattcactaataacatttctaggtagttaccagttttgtcatttttctggaaaatattttggagttgtaaattgtttctctttttcttctagagttacaaattgaatttttaaatccaagcacctttgttgtggtgtggagagaagtatcacaattttatgtttattttaccttctcaaccttctcttggggtactttgcaaatacctgagtctaaacagaagtaccaaatacatgctctatgaactctatccttagtaaatctattaaacctgaataacttaaaagatcatgtgtgttttgtaatagcaaaatttgattttaattttttatttggaattggtgtatttatcatggggacttccagtttttcttcacttttcaaatggatattggctatagttttatgttttaatgggaatgaatttcaagtcaattaataatcagaaaatttttagttttacttttttcttttacaatatggacttttgttgttatttggatagtagttcaataaatcttaagctcagataattaaacactattttgaatcttaacaagatactgagcatttttttgtatgggatgatatcagcctatgtacaatgaatttaataaacttaagtattatcagatattttgcacattttagatcaataaaatctgaattaactgttcaagatttttttatctgtatttggaaatataattttgtaaaatcaatgtcttacctttttattacaatagatcatgttttgtattcaataaagcaagaagcccttttatctgttgtttttcagggaagggagtaacatttaattctgtttgtttacatttgttttcattgttatccaatgctcattttatgttgctttataagtaagcttaggtataacagaataagtatctgtttatctaatctacatgtgactactttagtctctctcagtcacttaatattatgctgaaatttaccactgtggggatgaatgatcactatccaacaagcgtatttgaacatgtaaatgcttaagaaataagtataatatggatatagtttgggttaatagtattctcatagttttttccctctatgaaacataagtaatgattttagtgtatttcttatggaatacactcatttataaaggactttaagaaattgtggatgtgaataatatctttctctagtaaaaatttaaattgtaaaaaaaaaacccaaaacctttctgatattttcattgtgatttcactgaatctatagatttagttgggaagaactgacatcctgacaatattgagctttttgtcttacaagaaatgctcaagggagtcctgcatctggaagtgaaaagaggatcattaccatcatgacaacatgcaaaagtataaaatccactggcaaagcagatacacataagagaaaagaatcaaaccttattactacagaaaactaccaaaaccacaatcgtaaacaataagagaggaagagaggaataaaagatatacaaaacaactagcaaacaatgaataaaatgacagaagaaggttcttacctataataactttgaatgtaaacagattaaatcccccacttaaaatatatagactggctgaatggattttttaaatgacccaactatgtgcttcccataagaaactcactttacctatcaaaaaacatatagactgaaagtgaagggatggaaaaagacattctacccaagtgggaaccaaaagcaaataggagtagctatgtttatatcagataaaaataaaacagacaagggataaattcagcaagagcatataacaatagtaaatatatatgcacccaaaactggagcacctagctacagaaaacaattattattagatctaaagggagagatagactcccatacaataatagttgtggacttcaataacccaatctcaatactggacagatcatctagacaggaagtcaacaaagatacattgtatttaaatttcactttagaccaaatagacttaacagacattgacagaatagttcatgcaacagctgcagaatacacattttttttcattagcacatggaaaaatctcctggagagaccacacattgggctacaaagcaagtctcaacaagtttaaaagtactgaaatcacatcaagtatactttctgacggcaaggaaataaagctagaaatcaataacagaaataactttcaaaactgtacaaatacatcaaaattaacaacatgctcttgaacaaccaatggattaataaaaaattaggaagtacatttaaaatttcttgaatcacatgaaagtataaacacaatgtatcaaaagctatgggatacagcaaaagcagtattaagaaggaattttatagcaataaacacctacatcgaaaaaagtagaaatatttcaaataaacaatctaatgatgcacctcaaggaacaagaaaaacaaaagcaaaccaaactcaaaattagtaggaaaaatgaactaatgaagatcagagcaaaaataaatgaaattgaaagtaaaaataaaatacaaaagatcaataaaacaaagagttttgtttgtaaaaaaataaacaaaattaacaaatgtttagctaaacaaagtaagaaaaaagaaagactcaaataaatgaaatcagacatgaaaaaggagacatgacaattgataccacagaaatacaaagaatcattggagtctattacaatcaaccatgagtcaacaaattggaaagcctagtaaaaatgtataatttctcaggcatatacaacctatcaagattgaaccaaaaagaaatagagagtctaaacagactaattacaagtaatgaaatataaccagtaataaaaactctctcatcaaagaaaagcccaggacctgatggcttcaatgctgaattctaccaaacattaaaaaaaatacttaatacccattcttttcaaactgttccaaaaaatcaaagaaaagagagttcttcttaattcattctatgaaggcagcattacccttataccaaaaccagaatgggacacaagaagaaatgaaaacagcagaccaatatcgctgatgaatagaagtgcaataattctcaatgacatactaggaaat

SEQ ID NO: 93966 - DNA, 31972 bp, Homo sapiens
  misc_feature (1)...(31972): n = A,T,C or G
aaatgttaatctcctttgacaacaccctcacagacacacccaggaaaaatactttgcatccttcaatccaatcaagttgacactcaatattaacaatcacaatagattacagacttaaatgcaagacacgacactttgaaccagtagaagaaaacatctgggagacacctcaggacattggtctgggcaaggattttttttttggtaagacctcaaaagcacaggcaacaaaagcaaatagacaaacggggtcatacgaaaccaaaaagcttctgcacagcaaagaaacaaatcaacaaagtgaagagacaacctacagaatgagaaaaaatatttgcaaatcatccatctgacaagggattagtaattagaatacataaggaacttaaacaactgaatagcaaaaaaaaaaaccacctcaaaataatccttttaaaaaataggcaaactatctgaatagacatttctcaaaagaggagatacaaatggcaaacacatacattaaaaaatggtcaacatcactaatcatctaggaaatgcaagtcaaaaccatgataagatgtcatctcacccctgttaacatatgtaattatttttatacattgttggatttgatttgatattttcttgaggattttgcatctaggtttgtgagcaatattaatctgtatagtttttttgtttctttcttcttttcttctttctcttttcatttcttgtcatgtctgtctgtatttggcattaggtataatgctggcctcataaaatgaattaggcaatatttcctctgcttctgtctttcaaaagacatggaagaaaattggtataattccttccttaaatgtttagtagatgcaacggcctacagcattatgctgccctgggccgcgacagcgtgggcgccgcctcggtcaacctggagccctcggatgtgccgcaggacgtgtacagcagcgtggccgcgcaggtggaggtgttccgtaggcaggacgcccagcggggcatgcgggtggcacaggtgctggaaggcttcatcacccgcaaggtggtgaagcagacggtgatgaccgtggtgtacggggtcacccgctacggtgggcgcctgcagattgagaagcgcctccgggagctgaacgactttccccaggagttcgtgtgggaggcctcccactacctcgtacgccaggtcttcaggagtctacaggagatgttctcggggacccgggccatccagcactggctgatcgagagcgcccacctcgtctcccacacgggctctgtggtggagtgggtcacccccctgggcgtccccatcatccagccgtatcgcctggagtccaaggtcaagcaatcaggaggtggaattcagagcatcacttacacccacaacagagacatcagccggaagcccaacacacctaagcagaagaacggcttccggcccaacttcatccactcgctggactcctcacacatgatgctcaccaccctgcactgctacaggaagggcctgaccttcgtctctgtgcacgactgttaccggacccatgcagctgatgtctccatcatgaaccaggtgtgccgggagcagtttgcttgcacagcgagtccatcctgcaggacctgtccaggttcctggtcaggcggttctgctctgagccccagaagatcttggaggccagccagatgaaggagacactgcaggtggtgcccaagccaggggccttcgacctggagctggtgaagcgttccacctacttcttcagctgacacccggcgggccttgtgccagtgtgtaaataaagctcttttgccaccccctcaaaaaaaaaaaaagtctagtagaattaatcagtgaaccaattggggtcttggctttctgttttggaaggttattaattattgtttcaatcgatttaatagatataggcctattcggattatctattagcacttaccttttattcttttctttccccttctcgtatcttttggatggatggaaggtaaatgatggtatatacatgtgattcaaaattatgtagctggtaaaaattataacattgatagagaaatataggacccatatgcattatttaaatacctatataataatcataaaacatgtttatgccataagtgcaaggattgaaggacaatatgaaaagtgtagttaggtgaatcttacaaattatttaaagagactgtttaaggttagtcaagcagagtgacatacagaaaagaagactactattaaatcattggcaatatccctctgtattaggccactcttgtgttgctataaagaaatacctggctgggtatggtggctcatgcctgtaatcccagcattttaggatgccaaggtgggagaattgcttgaggcttggagtttaagaccaaaaaaaaaaaaaaaaaaaaaaggaaatacctgagactgggtaatttgtaaacaaaagaggtttaactggatcacggttctgcaggctgtacaggaagcatagtggcatctggttctggggaggcctcagggagcttttactcgtgttagaaggcaaagtgggagcgggcacatcacttggcaaaagcaggagcaagagagagagggtcaggtgctacacagttttaaataaccatatcttgcaagaactcactaacacgaagaccacatcaagccatgagggatccgcccccatgatccaaacacctcccaccaggcgccacatccagcattggggattacaattcaacatgagatttgggaagggacacagacagacccaaaccatatcaacccctaatgccagcagaaccactgagtagctttaggatcttcagaaaggattttaaagctcgaatagtcccagcactgtaataattacaagagaaaatgtaactacaatgtagcatctacacaataattgtgattctcttctccgttcttgttcaatccaatgtttaatataaaaattcaagtgaaggtaaataaaagcattggggaatgaccttgccatgtggtattaagaagaagattctcaagcacaactgcctaagttgcaattaccacagctacatctagaaggaagatgtgagagttttcattccacattaactagaaacctagcatgaggcagatggctggaagcagtcgagggagtgtccaagaccttacacagaaaatcatgttcagagaggaagcttgttgctcattccttttttgtgcccagctgcctgggttcccttctccaccattttatttggtagtaagctatctagagaacttgctccctacgctgagccaataagcgaaatgtgtgagctttgaaggatacagtttcatttcgaggaatggagaatatctgtgcaaagttggggcagttcagagcagagtgagctgcagactgttctgcaggtatggggctggaagtcttcacacgacctcatagtcctggcacccaaacttactcagacaatggtgtgtccggaattggtgggttcttggtctcactgacttcaagaatgaagccgcggaccctcgcggtgagtgttacagctcttaaggtggcgcgtctggagtttgttctttctgatgttcagatgtgttcggagtttcttccttctggtgggttcgtggtctcgctggctcaggagtgaagctgcagactttcgcggtgagtgttacagctcataaaagcagtgtgaacctaaagagtgagcagcagcaagatttattgcaaagagtgaaagaacaaagcttccacagtgtggaagggggcctgagcgggttgccactgctggctcgggcagcctgcttttattctcttatctggccctacctatgtcctgctgattggtagagccaagtggtctgttttgacagggcgctgattggtgcgtttacaatccttgagctagacacaaaggttctccacgtccccaccagactcagaagcccagctggcttcacccagtggatcccgcaccggggctgcaggtggagctgcctgccagtcccgcgccgtgcgctcgcactcctcagcccttgggtggtcgatgggactgggcgccctggagcagggggcggcgctcattggggaggctcgggctgcacaggaacctacggaggccgggggctcaggcatggcgggctgcaggtcctgggccctgccccgcgggaaggcagctaaggcccggcgagaaatcgagcgcagcgccggtgggctggcactgctgggggaccgagtacaccttcccgagcagccgctggcccgggtgctaagcccctcattgcccggggctggcagggccggccggctgctccgagtgcggggcctgccaagcctacgcccacctggaactctagctggcccgcaagtgccgcgcgcagccccggttcgtactcgcgcctctccctccatacctccctgcaagctgagggagccggctctggccttggccagcctagaaaggggctcctacacctataagtgagaatatgcggtgtttggttttttgttcttgcgatagtttactgagaatgatgatttccaatttcatccatgtccctacacaatgagaacatatggacacaggaaggggaacatcacactctggggactgttgtggggtggggggaggggggagggatagcattgggagatatacctaatgctagatgacgagttagtgggtgcagcgcaccagcatggcacatgtatacatatgtaactaacctgcacattgtgcgcatgtaccctaaaacttaaagtataataataataataaaaaaatccaaaaaaaaagaaaagaagagaaaagaaaggggctcccacagtgcagcggtgggctgaagggctcctcaagtgccgccaaagtgggagcccaggcagaggaggcgccgagagcgagtgagggctgtgaggactgccagcatgctgtcacctctcagtgggagcaggtgtgacaagagttgggcaaatcagacctttaatccaccctgataggctggagtgtgggcttatggcatttctcctttgacccaattaacctccactcccaatgtatctctgtgcagaaggctcagctaggtgtatcagccattgtaaatcctcaacataaattataatttaacctagaatacagagactaggtagcaggaggagaggaaatgtagagatactaatctcttctcccttatcagaaagaaacctagcataagaaatttcacgcttaatgggccaaagagtaaatcagaaaactccatgggtgatggtatgctcatggtggtggtggtggtgatggggaattatttgccctcctgtgacctcccttggattaatttctccccaggacaatgggaaaaatcatttaatccttggagtttttttttttttttttttgcttgagagtgactctgatcctgtttctgatggtcatgttcctcagcatcatactgagtaagtcactggccttgtagcatctggagtgattggagtgatccaagatccctagttcccatgtcacaaatgaggatcccacatatctgggacagagatggaacattatttctgggtgtgtctatctaatctattcaccctatctatctaatttctcatctatatatatatttgcctacccatccatccatcaatccatcttagctgtacgtttatccattccatctatttatcctattatctatgtatctatctatcatctattaatagctatctatccatctgtctaatatatccattatctatatctactttatctatctacctaatgtatccatcctatctactctatctatctgtgcatctacccatccatctggaccctgagctgattcctctgcacccagctggcctgacgccaggtgttgattggctgcccaggctcaggagacacatccaggctgcagggattggttggcccagcccaacccagccagccctcccacagcctttgctatatcaagggccagggtcaaaggcctcccagcagacagagagaggaggttgtctgggacagactgctcctgacagaaggtgccaggctgggggtggcaggcctggggggggtcctggcctgggatggagaggggcactgcccaaggcccacgcagctcctgggtgctgscctggaggatgggtggtttccgagtaactgaaaccaagcccctggcaacctcacagtgattcaggctgggcctttctggactttaatcagtctctctctctctttcccattctaagtgcttactagggaactggaggccacttggctgctggwtttggttgggcctttctggactttacctctcagcccctttttacccatccctgagccctccctgctctacctccggcacygcccgtccctgcctctccactgtccctggaggtccctgggccgttctctgggcctcaggatctcaccgtccatcccgtctgccctgcaggatgtcccagctgagcctgtcctggctgggcctckgscsagtggcagcatccccttggctgctcctcctgctggtcggggcctcctggctcctggcccatgtcctggcctggacctacgccttctatgacaactgccgccgccttcggtgtttcccacaacccccragacggaactggttttggggacaccagggcatggtgagtgtggcagcaggatgggtctaggtctcaggatggatggacttcctgaggggtacgaggcttagggagtgggggtgaaggggtgggctgggatctggggtggcagagaagcagaggaggcrtcttactcattcctctgcttattcatttctgtgaggtgcctacgcaagcccttctcacttccttgtcctcccactccaggcctgcattgaatccttttcctgcctgtcttcccacattaatgcacctctgcggggctcctgggcagagggttggctgcacagagaggcgagtccctggcattcccacattctccattgctggactcgaggcttcttatgcccactgtccagggtcctctccttgcctggactatttcctgttatgagggtacagctgggccagaggagaggcatgggccgtctcccacttccactacacccgaaggcacctttctcttatattcttcttcttatctccctcttatcaatgagacctgttgccaaacccagataaaagttggccactcacttcacctttcagaagctttccttggcckttmtcctccccgtgaccttgccctctgacttagaccgctctcctctttggggaatgtggtcttagtctgctcatttgcaaatggcaggattgatggatgtgtccacagataaagtggaagggtgcacaggacacactagcacagagcctgctgcagaagctgctcccaggtgggagccattgtcctgatggacagttagagtcacctctgctccactagtggctgctgaaaagggaaggtctcccatgtgcagaaccttctccatgggaggaactggagcctctgtggatcagccaggacatgaaggcatgtggggaccagccttagggacatgtcctgaggcgatactgctccccacaaatctcccctgtgaggacctccccatatagctgcctctgggctgaaatgactcccagaaaaagaaaatccttcctctcaagataactgggcctctgtgagtggacagtgcgtcttctccctctgccctgggatgcacccttgggacttggagatggacccaagagagatagagcaggaggaatgtggatagatagatagatagagcaggaggaatgtagatagatagatagatagatagatagatagatagatagatagatagctaataggatagatagatagatgcacagataggatggatagatggatggatggatggatggacaggcrcgtaggtagatagataatagaatagatggatgcatggacacatggatgcacagatagcatggatggatggatggatggatggakggatggatggatrgatagatagacaaataataggacatatggatgcatggacacacggatscacagataggatggatggatggatggatgatggatggatgggtagatagagtagataggatggatagattatgtagacagatggagtagatatatatgatggatagattagacggatagatggctattaatagatgataagcagacagacagatgaatatatggatggatgaaagcacagataaaatggattgatggatagatgggtaggcagatagatatatagatagaaaaattagatagataggatgaatagattagacacacccagaaataatgtttgaccaactacctgggcatcccttagcccagtcaagtagacacctagaattaactatcacagaaggtaatgacccctgccttgcttgcaggtcaaccccacagaggagggcatgagagttctgactcagctggtggcyacctacccccagggctttaaggtctggatgggacccatctcccccctcctcagtttgtgccaccccgacatcatccggtctgtcatcaacgcctcaggtaccatctggaacagctggtggggcagtgcatttgaggcctgcacttccgctatccccaagctcctgtgtgggcccygcagtactctggcctctsctttccttccctctcagctatcttcatctttctttcatgtaytcatcaattyccatctcagcgtctcctctctcyattgccatctaccccctgtkctggtgttctgggctgccctggarccctaagagacctcaacccaaggcccwgtcctggaggaacccccaactttaaggagatggacctggatagagatatccccaacttcatgggatcaggaaagggccagagggagatggatcacagcccagggaagaacaaggtctctgctggggcaggctggaaggcttcctagaggaggagttactgsagctgtgtctggaacaatgagtaggaatgtttgaaaggagagtgcagggtgaggcaattggacatcgttagtattcaaggccccttgccaggcctagcatcaccttgcctgtcccaaagcctagaacaatgaggaggacttgtggctggtgggggatctgggctgctacttccatgatgtccacctctggtgggtcaattccctttaccccatcctatagcttgtctgccctaagttcgttgctctcctgctgcaggtcccggggatctccaagaggagactccaccccagcttgggtccctttccttgacccctgtgcttcccatcgttggacgggcgaggctgagcagggggaatgggcagcatcctacagagaccatggctctgacctmaaaatgctgagtgactctgggctggtacccagctgtctctggttattgaagtctctttcagttgtgagtggtggaaacccaacctggtgtggtctaagcaaagaaagataatctattgactttaaagtccagggagggtggccttcaggcatggctggatccaggtctcacacaaggtcactggaaatctgtctttctctctwggctttagctttctccangtcgcttttcctatcaaggtggccttttcctcatgatgtcaacgatgagtcccagaagctcagttcttatgggaaaggccacctttcccctagagttcccagawatggcccatgrtttacttctcctggcctggatcacaggaccaatttttcacccaatccctgtgtctctgattgcccagtcttggtaggcctgggtcttccagagctactgttttgggggcacaaagaagtttgttggttaaggattcaggccatgggtgcagacagacctagtcttaggcctcaggcttgccrtggtctgggactgtgggcaagtgactttattgttcagagcctcaggctcttcatctggaaaatgggatgaatgagagcccagggaacatggtgtgtggatccacatggggaaagaccttttctgtctgtgtaactgaaggactggagagtcctgcatggaggatgtgaggaggcagggggtgctcagcactgacaggaggatkagatgctgcttgaaattctcagggagagggcttcgacctcttccctgcagatccttctctctcacagcctaggagagcatgaattgggtcctgtgtgtttttctccagattcacagctcagaagaaggtctcctatacacacaaagcctggcgtgcacctttggggatatgggctgctggtgggtggggccctggcaggcagtcatccacatctttctccccacgtgcatcaagcctgtgctctttgctccaggtagacatygcactggccaagctttgcccacagctggggttgctgtgctgcctccagctgaacacgtgaccgatgtgcagacaggwggggctgtggtggagatgccattgcctccatcgcccctggacttccacctgtctaacctctgttsctgtttgctcatgtctggggcgtgwctctacaatggctgttatatggccaggtctgccttgtatatttacacctgggtcctggttacacctgaaatatgttatacctggttacatctggtatataattccaactggggtcatgtagagctggtcaagtttggggcttatctgtggccaaggacatttggggcatgtgagggcctgtttggttcttgtctcaggtgctgtttgacactgccgttttctcctggtggtccaaacatctgggcgttgtgwgaggtctgggggttgtgtgaggtctgggacccagggtccctatgtgaactgtctgagacattatttgagtcttgtctgaggcatgtgttatagtatatttgggtcatgcctgaggaacagtctggttcacatgttggctatgtctgtgacattaaaggtaccatatttatattcaacccagagcctgtatgtggaacacgcttttaagatcatgttagaccatctcatgtgcatgttagagcacaccatctcatgttaggaattgtcatgtattttgtggccatgtcaggacatgtgaacacatgtcagggtcatgtctcatgtccaggtccatgtcagaagatgccatrtsagaakatgtcagagrgtgctgggacagacagggtgtcctaggtccttgtgaagcattctgtagaatgctgarctgtgctcaggggttgcggaacatgttggatcgtgtaggaggcatgtcaaggcatgctggaaccctgacatagctcctacacgccatgttaggcagtgtcattgctgtactgtgctgctgtagcctggtctggtcttccctcccctccccatcctcccttcttcctctgcccttggccctcttcctgctatgtggggctcagagtgggagaagtgcaaacctcttgctgggagcctccacccacccccaaagtccctctttcacctgcctccatggcccctgattgtcctcatttatgtcagctgccattgcaccaaaggacaagttcttctacagcttcctggagccctggctgggtgagtatctgcaggtgaacagggttgggaaaaacgttggggggccaggggagggagasgtccttgcccatkgcccttkgctgccctgctaggggatgggctcctgctgagtgctggtgacaagtggagccrccaccgtcggatgctgacgcctgccttccatttcaacatcctgaagccctatatgaagattttcaatgagagtgtgaacatcatgcacgtgagttatttgaagscaaggtcccacttgcagccttggggtgaaaggacaacagagagatctagtctggmgttttggctctgctgggtgccattgggccattgctctttctcactgagccttggtttcctcatctgtaaaatggggataataatccctacttaaaagatggtcagagtaatgtaatggagtcacgtctctggtgcatagcaggtgcccagaaggtgtctgtttctatgtttccatcaccaaagccctgtaaacacaagagggtcatgacaacaatttcatagtagctgttgctgataagaaaccacctgaaaactcattggtttaaaccaataagtgtttatgtttgctaataagtctwtgggacagttggcaggttcttctgtatatggaagggaccactcatggtacatgagcagctgggggtcaggtaggcagccttgcaggtgttgactgaattctgccacatgtttgggttttggctgggacatgtttgggttctctcacgtgtctaggtttggcctcatctgggacccctggatgttcctccctatgattgtctccttccagaaggcgcgccatggttcacaatgcaggcagggttccaaggagtaagacaaggcttagcttcgttagttattaactcatcattttcaccacattgtattttgacatcgaaagccaaaagtccaacacagaatcaaaggcagggggataaaataggctctgtctattaatgggagttgctgaaaaatcacattgcaaagggtgtggatatggcaggaagggaagaattgtggcaaaggttttgcgaagtatctaggattttttttttaacttgcaaattgataagttagcttgttactgtttcataaattcttccagaaggacgagagactcctgggtcagagacaaaggatagtttactactcatgacacagacagcagcatgtgtttcttgttagattgccttttttccctccaagcttcccaaatcccatgggctgacacaggtgggcttctataagtgcctgctgacatcatatattgcattacagaagaggagctttaagcttagggaatctgcttttatagaaagcaaaagcaacatgtctagagggagtctttaccttatccctcaaagtttttcttcgcaaacacaactctgagaaattttccatgttaaggacatcagtgtcttgcattcatgacatgcccagaaagaatgctcaggactcaacgaaggactacctccccaaaaacagggatatttttgaaatcaatttataacaatgcagacggggaaatccaacatttattgatcacataccatatgccagaaacaatgccatgtgcccattccatgatatgagtatgtattgtctaatttgattttaacagctctgcgaaggagagattatgtatttttgccccatggtagatgatgaaactgcaggtctgagagattagggaactaacccaagttcacccagctaataagtgagcatggcgaggtggagcagagtttctaatgtgaattatatggctccaaagcacatcatcttaactgtttctgaagatttgacaggcaggatataggggagggtaatgagttgactaatggcacacagagcacaggggacagagctggaacttgaacctagttctcctaactcccaatcttgggtcttcatctcttaatagtaacagcttttgtttgcaccataacctggtgctccctggggaggggtccctggggagaagatgaagaggcttattctggggagcccatcttggcagttggggttggagaggtgctcaagggagcaaggagcctgccccagctctgtccccttctctggctaggccaagtggcagctcctggcctcagaggdtagtgcctgtttggatatgtttgagcacatcagcctcatgaccttggacagtctacagaaatgtgtcttcagctttgacagccattgtcaggagtaagttcttgcccaggatctgggatcttgggctgtggacccaaagtgggtaggtgggagagggaggactaagcagggaaaccagacaaaccttcctggaggagttttgttatacctgatcattgaaggactggtatgaactttatcttgaggtttccagggagccattgaaggggtttgaactggtgggtgtggtcagagctctgtaggggactgactaatgtagcactaaatggagttaacactgatgcaaagaggctagggtgaaagctagaccatggaccagttgcaggaggataaagtctgagctttgtggacagtttcaaggagacgggtcaggactgtatactgggagggaaagagagaataggagaataatgtgcaagctatgctctgggtgcctagcggcatggaggcatctcacagagatgggatgcagggagagaagagagcttggagaatcaatctcatgctgatccccaccctgtatctgtggggtcatctgttcctggwtactctgtttactgataggaggtagatcctggctgctggtgggaggtgatcctggggcttcaggtatattaaattgttgcctccctttctgcccttatcctgcaggaaacccagtgaatatattgccgccatcttggagctcagtgcccttgtatcaaaaagacaccatgagatcctcctgcatattgacttcctgtattatctcacccctgatgggcagcgtttccgcagggcctgccgcctggtgcacgacttcacagatgccgtcatccaggagcggcgcygcacyctccctagccagggtgttgatgacttcctccaagccaaggccaaatccaagactttggacttcattgatgtactcctgctgagcaaggtgggcctctytgggatytgaattcaagaagtagaagggagcttcatgtgaaatgtcagatgaaagratttgaacttgattaagagggcactagggagccatggaaggtgattgaggaagggagggacaggtcagagataggttttagagatgactgtggagtgcacctagcagggagctgctaggcttgaaactgacaagtctgagagtttgctctatttacaaactaatgagttaattgtccacatttaactccatacatctacatctatatctatgtctggtctatgtttatgtttttgcctatgtctttctatatctttgtctctgtttgagtttgtgtctctatgactgtgactatgtgtatgtctttgtctttgtaattggccatatctgtatgtctttttatctatgtcttcatctttgtctatgtctacgcctttgtcctgtcttttctatgtctctgtttatgtctttgtctctgtctatattttcatccatgtctatgtgtatgtgtatatctgtgtctgcgtctatgcctttgtcttttttctgtgtttgtgtctttgtctcagtgtatgtctatgtccatgttttttgtctgtgtctatgactatgtcttcgtctatggctatgtctatgtcaatgctatgtctatatctttgtctgtgcctgtgcttgtgtctgtttctgtctatgtctatgtttatgtctatcagtagttgtgtctgagtgtgtgtcatgtctatgtttatgtgtatttttgtgtctgtgtttctaagtctgtgacttagtctatgtatgtgtgcgtctgtgtctatatctgtgtctatgtctatgtttatgtgtacttgtgtgtctgtgtttctaagtctgtgactttgtctatgtgcgtgtgtgtctgtgtctatgtctatgtgtatttgtatttgtgtgtctgtgtttctaagtctgtgacttcatctatgtgtgtgcgtctgtatctatatctgtgtctatgtctatgtttatgtgtacttgtgtgtctgtgtttctaagtttgtgactttgtctatgtgcgtgtgtgtctgtgtctatgtctatgtttatgtgtatttgtgtgtctgtgtttctaagtctgtgacttcatctatgtgtgtgcgtctgtgtctatctgtgtctatgtttatgtgtatttgtatttgtgtgcctgtgtttctaagtctgtgactttgtctatgtgtgtgtgtctatgtctatgtttgtttatgtgtatttgtgtgtctgtgtttctaaatctgtgacttcatctatgtgtgtttgtgtctgtgtctatgtctgtgtttatgtgtatttgtgtgtccatgtttctaagtctgtgacagtctatgtgtgtgtgtgtctgtgtctatatctgtgtctatgtctatgtttacgtgtatttgtgtgtctgtgtttctaagtctgtgactttgtctatgtgtgtgtgtgtctgtgtctatatctatgtctatgtctaggtttatgtgtatttgtgtgcctgtgtttctaagtctgtgacttagtctatgtgtgcgtgtgtctgtgtctatgtctatgtttatgtgtgtttgtgtttctaagtctgtgattttgtgtatgtgtgtgtatgtctgtgtctatatctgtgtctatgtctatgtttacgtgtatttgtgtgtctgtgtttctaagtctgtgacttagtctatatgtgtgtgcctgtgtctatatctgtgtctatgtctatgtttatgtgtatttgtgtgtccatgtttctaagtctgtgacttagtctatgtgtgtgtgtgtctgtgtctatatctgtgtctatgtctaggtttacgtgtatttgtgtgtctgtgtttctaagtctgtgactttatctatgtgtgtgtgtctgtgtctatatctgtgtctatgtctatgtttatgtgtatttatgtgtctgtgtttctaagtctgtgactttgtctatgtgtgtgtgtgtctatgtctatgtttatgtgtgtctgtgtttctaagtctgtgattttgtgtatgtgtgtgtatgtctgtgtctatatctgtgtctatgtctatgtttacgtgtatttgtgtgtctgtgtttctaagtctgtgacttagtctatatgtgtgtgcctgtgtctatatctgtgtctatgtctatgtttatttgtatttgtgtgtttgtgtttctaagtctgtgactttatgtgtgtgtgtctgtgtctatatctgtgttatgtctatgtttatgtgtatttgtgtgtctgtgtcagtttctaagtctatgactttgtctatrtgtgtttgtgtctgtgtctatgtctttgtctatgtgtaggtctattgtgacagatgcattaaacctctagatcagagcagcccatgtcttgctcacagcaatactgttagccagagtgggattgtggcactggctcttcatcctcaagtcaaatttctccaagggtaatgttttcacttgtatgtgcagcagagtttgcatcctaagagaggggccctacattatgagtcttggcacattttctatttcttcccaagaaagagaatgagagagacagagaaagagagagagagagattgagtgagaatggtagctttgtgagagatggtgtgctttgttctggagcataaacaaatcytcttcagtgagatgccatagtccttagccttacaacccaaacgtctccagggggataagattctctagatttatcactctagaatgtgggcaaatctttgaagcaatacttaatctctaatttccaagggaaattgccattkaattctcctgtaactcaggttgccagtaactttttctcagaaacttttcattaaaatattcatgggtcattgagtcttcccagtaggaacccaagaggaggcaaggaagccagagaggaaggccatgaggtgagggctctggccatggtgaccaagaggggtctaggagtgcaagatgkacttggatttctggaaaaaggatgaatcttcagagactgtctcagattagactcaagagcccttagagctagtgtgactttttatgggggtgggggttgggggggggttactgccttctctccaggatgaagacgggaagaagttatctgatgaggacataagagcagaagctgacacctttatgtttgagggtgagggccccagtgtggggctagagaggggaccgggatctctcccttccaggaacagggtgggtagacccccacaaccttcccatcccccttcccccatcctccctgaggccctcaatgcatgggtgctgtctaccttcgggtrctgaagcagcccagagacccaagcctgcctkgctgccccccaggccatgacaccacggccagtggtctctcctgggtcctgtaccaycttgcaaagcacccagaataccaggagcgctgccggcaggaggtgcaagaacttctgaaggaccgtgagcctaaagagattgaatggtgagtgcargtgcttgtggcctcttcctgagaccttctcattggctctgctcyccaggtggggaggggaggaaaagctgtttttgttgattctgccactattgcctagtgggaataggagcagaggaccacaggcaggacttagtacmcatcctgactgtctggggaaaggttataggcccttaggacagaaagacctgggcttctgagagagttggtgatgatatgtgaggacagataacgccacttagcacgtgttcagcaaatgaacttcccctccactctcttcctttcctcccagaaatatcattttttttgaacatcttcacttcttgaatgtttgctcttctgttccctaattcctactctccagtcgagtccagggttttataagggagacctaggggtaaaattcatccattcttgtccggaacacttgcactgttcatccgtcccatccttattcagcaaacactcccacactgcattctcacccccacatctgtgcacagcatctttctgtgctctggagacctgggaaggaaccaacccagggatctgttttccaggtgctcccagcctggtggtggagctgtccctgggcaggacactcccagcccacatgggcagagatgggatttacagtaagagaagcaggactagggggtatagaaagtgtctcagttgagagcctaaataatgatcagtagataattgggtacagttggggggcagtgctctaggtcaagaagactgcctgtggtctttgggggaggaagagagagggaggaagagagagaggagagcgagggagagagagagaaggagagagagagagagcagggtcaggacagaaaggaggagaaggggagagagagggagagactgagttgtaatgagatgataaaaccggagatggtagcaggggctggctgtggaagccttggggaaaatgttaatggcttcagttttagcccaatggcaatagggagccatgggaagtgtttgagcagtgtagggacaggtcacatctgggtaccaggaagatctttctagggctagtgtggagggcgtactggagaggaccagctgtagaatgaaggcacagtggggacattctgagaccagagccaggccaggggctggaggaaggagaggaagcattggaatggacggatgtcttggattcagtgtcctctcgtccacacctttgcccagcacagcagtccagtgaggaggagaaacatttttctgcttttaaaaccaataatttttctgcatttttaacaaacaattttttattgctgcataaatagatgcacatagatttgaaatacatgtgataatctaatacattcatataactggtaaagatcaaatcagtgtacttgggatatctgtcgcctgaaatatttagtcttttctttatgctagaaacataactaacataagctaactatttaggaatatacagtacatatcgtaaactatagtgaacccactgatctatcaagtgctaggttttatttctcctatcaaacctcttatttatgcccgttaatcaacttctcctcacccctccctcccttctaccaatctaccttctactttcatgagatccactttttcagctcccacatgtgagtgagaacatgcgatatttgtctttctctttttggcttatttacttaccacagtgacctccagttccatccatgttgccacaaatgacaaaattccagtgtttttaatggtgcatagtattccattgtgtatacatgccacatttcctttcttccttccttccttcttccctccctccctctctctctttctctctttcttctttcctttctttctttctttgagacagagtcttgttctgtcgcccaggctgaagtgcggtggcacgatcttggctcactgcaacctctgcctcccgggttcaagctattcttctgcctcagcctcccaagcagctgggactatgggtgcacaccaccacgcctggctaatttttgtatttttaatagggctggggtttcaccatattggccaggctggtctcgaactcctgacctcatgatctgcctgcctcggcctcccaaagtgctgggattacaggcatgagccaccgcacccggccgccacattttctttatccattcagttgatgggcacttaggttgattccatattttggctgttttgaatagtgctgcaataaatacggaagtatagatatctcttcaacagwtttattttctttctttgggatagaaatttcttctctttcttttcagtagtggaatttctgggttatatgttagttctacttttagtttcttgaggaacctctgtgctgttctctgcagtggctgcgctaatttatattcctgccaacagtgtgtgagagttcccctttctccatatcctcaccagtgtctatcgttgcctgtctttttgataaaagccattttaactgggatgagatgatatctcattgtggttttgatttgcatttctctgatgattagtgacattgagcatttttccatctatctgttggccatttgtatgtcttattttaagaaatgtctattcagatcttttgaccatttttaaataagatgatttgagttctttttcccctattgagttatttgagctccttatataatatattctggttattaatcgcttgtcagatgagtaatttgagaatattttctgccattctgtaagttgattcttcactttgttgactgtttcctttgctgtgcaraagctttttaccttgatgtaatctcatttgtctattgcctgtgcttttgaggtcttaacacagaaaatctttgcctggacccatgtcctggagtataaaatccagatttcaagcaaaattatggatgtggttaaaagaaagggtccaaaaaattttatgataaaaatgagcttccttattaagctccaccttagcagtgactatggtcaacagttttctgtgtattcttccagaaaatggctatcccaatgcccacatttatatgaattcacactgtgatttttatttatatgaacacatactgtgtttttctttgtaaagaaaactatacaaaatagacgcagttctggacattatctctgagatctatttttcttaaaatacgagttttcaaaaatgagtttgtttttaaattgttctttcattgataaattttaataatcaaggtaatgaacaaatccatcacttcatatatttatcatttttatgttgagaacatatatatattagaggtacaatgtgatgttatgatgtatgtatacaacctgaaattattaaatcaaggtaatgaacaaatccatcacttcatatatttatcatttttatgttgagaacatttgaaatttactctcttagcaatttcaattaatacattgttcactaaatcaccatgctgtgcagtagatctcaaaaactattcctcttgtctaactgaagcttctatcctttgaccaacatctcacccttctctatccctccctcagccctggcctctggtaaccatcattctgcttctatttcttttcttttctttctttcttttttttttcatttttgagatggagtctcrctctgtcacccaggctggagtgcagtggcacgatctcagcttactgcgacctctgcctcccaggttcaagtgattctcctgcctcagcctcctgagtagctgggattacaggctcccgcaaccacgcttggctaatttttttgtatttttattagagacggggtttcaccatattggacaggctggtcttgaactcctgaccttgtgatctgccgcccttggcctcccaaagtgctgggattacaggcgtgagccaccgcgcccgacctccactcctgtttctatgagcttgactattttaggtcccaagataagtaagatcatgtgtgtttgtgtttctgagcctagcttacttcacttagcataagttcctccaggttctttcatgttgtggcaaacaaaataagttttctttctttttttttttttaaggctgaatggtattccattgtatatacacaccacatggaaaatgagcattaaattayaaaaccagtgataagaacagattcttcttgcaccaaatgagatattacagataagactagctttttccttgacaatcctgccaccccacctaatcctttctcattctccaaaggtgtctccagagccatagatttgttatctatctatctatctatccatcatctatctatgtatctatatacctatctactatctatatatcatctatgtatctctgtttctatcatctatgtatgtatctgtctattctctatctctctatatctcttatttattatctgtcatctatcaatctatcatctatctctgaatcattaatttcataaatatatattcatatactttttgccctttttatgtgcacaaatgtatatatttgtaacttgttttcactcgacagtgtgtcttaatgctatttttttctgaatgctaaatattttattccttatttattcagctcattcctatgttgaatgcacataaacattttcagttatagtagatatttccaatttgccttccacagtgtctgtactgatttaccttccagcctgcagaatgtgatgagactagtgatccctatttcctccttttgtgtagctgtatagtattccatcgtgtggctgtttatctaaacatcttcccatcaatgtgtatgtggcttgtttccaaccttttgctaaaagtggacatgaggcagtcagcatgtgtgcacagtgaccattccttgcatgtataagcatctctgcaggacaaattccctgaagtgcaattgctgaatcaaagaacatttgcactgtacaattttaattatcattgcaaatcctttcctattagctgagtttgatggcacaarttttcccataactttaccaatactactaatgtattattaaattttaaaatctatgccaatcttcatatttcttcttttgatggacattgttttaaataagagtgaggttgaacatctctttcacgtgttgatgtttgtttctttttatggaagtggttcctttatttttttgctctttttctttggattctttaaaaatatttacttttaagaatgtgtattaaaattgattttttttttttragatgcagtctctatcgcccaggttggagtgcagtggtgtgatctcagctcactgcaacctccacctcccaggttcaagccattctcttgcctcagcctcccgagtagctgggactacaggtgccctccaccataccccgctaagtttttgtatttttagtagagacggggtttcactgtgttagctaggatggtctcgatctcctcatgttgtgatccacctgccttagcctcccaaagtgctgggattacaggcatgagccaccacgcccagccaaaattgatttttttttttctgtcttgggttgcaaaatattgcctttcaacttttggagggtacttttcattactatcctttatctgcaaaaactaccatcttgagcatattcaacttctgtgaagttaaattgatccacttttttcttttacaactgtaaaatccatcagtttcccaggattttggtttgagcaggggctgtctttatcaaatgtgaagttttcacttattctcatgtctttttctgagctctccctcatgttccatgggtctgttttctcatttttgccacagtgccacactatttttattcttgcgactttgtaacaattcttgttaaaagtttattttattgcggggagaaaaggtctcacttgcaaacagagagaagctggagaattgtgtctttgctcccttgataaggattggggctggggtgtttccttagggacgacctggcccatttgcccttcctgaccatgtgcatgaaggagagcctgcggctgcatcccccagtcccggtcatctcccgccatgtcacccaggacattgtgctcccagacggccgggtcatccccaaaggtgctcacagcctcacggggaggagtctcctgggtaggaagaggggcccctcagtgaaggaggccttctcctgactgctcccttctctcccacaggcattatctgcctcatcagtgttttcggaacccatcacaacccagctrtgtggccggaccctgaggtgcggggcccctctctctgtttttgtccattccaaggctcctagaggagggggcagggttttgatcaggagtatccaacatcacctccctcaaagacacacacaactgtctgtctctccaaggctggcggactgggagaccccacccaacaacccttcttggtctcacctccaggtctacgacccctttcgctttgacccagagaacatcaaggagaggtcacctctggcttttattcccttctcggcagggcccaggtaagggcggcctgtgtctgaggygggracgggttgatgggtgcaggggtctgggcatgacagtggggaaaagggggacattgtagatggtccaagttccagctctcyttccctcacctcctctggagtttataggaaaaggtccatagagtacggttgggttggtcctagaagggtctgtggtgtgctcagagccccctcctaccccaccttggtctaggctgggggttggagctcggctaggcttgcaggatatgcaagcccgcatggggatccaggcacggwtacccccttctctattcctcaaactgctctaggtggggttgggtgtcccaggccaggttaccggcttgatggggccaggatggggctcctgggtgcagtcagagttcccacctccctccccwaggaactgcatcgggcagacgttcgcgatggcggagatgaaggtggtcctggsgctcacgctgctgcgcttccgcgtcctgcctgaccacaccgagccccgcaggaagccggagctggtcctgcgcgcagagggcggactttggctgcgggtggagcccctgagctgagttctgcagagacccactctgaccccactaaaatgacccctgattcatcaaaagtgargcctagaattaccctaagaccctgttccacagtcctgtattccatcctagatatctactcaaaataattgagacaagtgttcaaacagaaagacgcttgtgcgtgaatgttcatggcrgccctattcacagtagccaaacgatgaaaacaaccccaagctatatattaccagatgaaaggataaacaaaatgtggtccatccatacaatggagtattacacagccataaaaaggaatgaagcagtgatccctactacactgtggatgaaccttgaatgcatgatactgaatgaaagacgtcagatgcaaaaggtcacatagtgtactgtccttttatacgaaatttccagaacaggccaatctgaagagatgcatagcggattggtggctttcagcagctgtggggaggtgggactgaggagcgactgctaatcagtatggggtttcctcccgggatggtgaaaatgttccggacctagatastgacgaaggtagcacgacactgtgagtgcactaaatgctattgaattggacactttgaaatggtgaatttcgtggtatgtgaattctacctcaatcaaaaaaatttgctattttatctcacatacattttttttctgtccaggttgttcatataataatatgctgtgagcatctttccatgacattaaatcatcttaggaaacattattttgtggtcctcaaaatgtgtgtgttaagtgttcaaatcagtcttaatttaaaaaaagacatcatattagaaaataaaagtgttttgtctcactttgtaagaattagcttcatatacattgactattagtaacaaattgagttattcttcatcaagtaacttttggggtagagatctcattttcacagcaatagatgcacaaatattcatgtaagatacaggtgtggttagacacctttcatagaacagttatgatctggaaattccacagacactgaatattttggtcgtattaacagaagtagatcactgagaagggagaaggtgacttttcagctcccccaggtaaatgctgatttcatcctcacatcgatcttacagattgtagatgaactcacttgttcaaggtcactcagtgaagggtggagtcgggggtgaatctgagcagttggcatcagaggtcatgccttatcgtatcaaggacatgattttcaaagcgagtctcagccctaggcacatcagattacctgggaacccctacagactctagactgagtagatgagactctttgacaggtggtgcctacatttgctttgttttgttttttgtttctttttctttttctttttcttttttaattcattttgtctttttgagacagagtctccctcagtctctcaggctagagtgcagtggcacaatcatagctcactgcaacctcaaactcctggccaaagtgatggcattaaaggtgtgagcccctcctcccagtcccgattttttttttttgagatggagtctcactatgtcgcccaggctggagtgcagtggcacaatcttggctcactgaaacctctgccttccgggttccagcgattctcctgcctcagcctcccgagtagctgaaattgcaggtacgctctaccgcacccagctaattttttgtatttttagtagagacggggttacaccatgttggccaggctggtcttgaactcctgacctcagatgatccacctgccctggcctcccaaagtgctggggttacaggcgtgagccactgcacccagccccaagtttttaaatataatattgttgaccagaagtacattcactcgtgtaaaaaataaaatacccagtgagaagtaatggtgctacatatgcccttcatctgcccagtttcttcatgtgtataaaggtaaatactttcacacctagtgcatcctttcatagtatatttagccaaacaatatatgtaattagtcaccctaattacatattagcatgcctacattacaatgagtgtgcttacttgccactcctgtattttcatggctcatcttaaaatcacattaaattttcagaatttgttttctttggtgcttagttcagtttgttttttgagacagagtctcattctgtcacccaggctggagtacagtggtgcaatctcagctcactgcaacctccacctcctgggttcaagcggttctcccgcctcagcctcccaagtaactggaattacaggtgcacaccaccacacccggctaatttttgtatttttaatagagatggggttttgccatgttggccaggcaggtctcaaactcctgacctcaggtgatctgccccctcagcctcccaaagtgctgggattacaggcgtgagatagttcagagttttgacacatggctagagtcatgtaaccactactgccacagccacccttggtggtcaaaaacctccttccactcctgacccctgaaaaccactgctgttttctgtcttcccatagatttgctttcttcctatagttgtgtgaatggggttatgccattgggagcctaggagtcttgctgctttcacttagtataaagcatctgagagtctcccatgttgtctgtatcaaaaccttgtttcctcttattgctgggtagaatttctgggcatggataggacactctttgttcagtggctgaagggcaagtggattgtttctggtttttggatattatgaataaaactgttatggatatttgtacacaggttcttcagggaaactaaattcccattgctgttagaatgggatggctggggcatattatcagtgtatgtttaccatgatgagaaactatcaaactgtttccaaaaggtccatgtcatttttaattcctatcaggaatgtattgaagtggcgttgttgtctggggtaaatacccaatgttcatcatctcacatcaaggaaatcaaggacaccgacacacaagaagtaagcttaagagttgaggtttaggctgagcgcagtggctcatgcctgtaatccagcactttgggaggctggggcaggtggattacctgaggtcaggagttcgagaccagcctgaccaacatggcaaaaccctgtctctactaaaaatacaaaaaattagccaggtgtggtggcgcacacctgtagtgtgctactcgggaggctgaggcaggagaatcacttgaacccaggaggcagaggttgcagcaagctgagatcgcaccattgcactctagcctgggcaacaagagcaaaactccatctcaaaaaataaaaataaaaaaaagagtggaggtttaataggcgagagaaaagagaaaagctctctcttctgcagagaaagaggggctcctgaatgggtcttgtggttttgtggtgaaacgcatggggttttatagacaagcttgaggaggcagtgcctgatttacatagggcatgaaagattggtcagaccaggtgtgctgtttgcatagcatgggaggaagctggctatcccaccctgatcttttattatgcagataggggtctctacctggccggtgctttttctacctgttgcctgcttttcactacacacatggtgacaaagaaaagggaagaggaaacctccaagttgaatacacctggcttccagatatcccttttctattggcacagctgccggcatttacccatgtaaacttccagcttgcttatctgtgcttgcagcttgatatttcaggctgctttttgttagaaaagaaatgacttgggggctgctttttatgaaaaggaaaccttactgataactgtcttatcctcactatctgccaaaataatttctttctagctcctgtattggtatgagaattctagttcctccaaatactcacctgtacttgatagtgtcagtttttttttccagtcttccttgtgggtatgctgcggtatgtcacagagattttagtctgcatttctccatcttttcatgtgccttctttgtattttctttggtaaagtgtctgttctaatcttttgtccattaattttccttgggttgtttgctttcttatttttggattttgagagttctttatagattatattttgcagacaagtcttttgtcagatgtgtgatttgcaagtattttcccctagtctgcggctagccttttcattatctgtttttttttcttttctttttttttttcctttttaagacagagtctcactctgtcaccccagctggagtgcagtggcgccatcttggctcactgcaatctccatctcctgagttcaagcaattctcctgtctcagccttgggactataggtgcctgccaccatgccccgctagtttttgtatttttagtatagacgaggtttcacgttgttgaccaggctggtctcgaactcctgacctcaggtgatccacctgttataagtaaagttttggtgccgcaaaagaaatatcactcaaatataaaattttctttttaattctcagcaaggaaaggtacttctatagaagggtgcacccttacagatggagcaatggtgagctcacacttggacaagggaggggaaggggttcttatccttgatgcatgtggcccctgctgctgtgtcgttcctctattggctagggttagaccacacaggctaaactaattccgattggctaatttaaacagagtggtgggatgagtggtttggcgggaaaaatggttatgacagagcaggtaatcagaatgagtcacggtggagtaggtaataggaatgagtcagggtggaacaggtaatccgaaaaggctgctttatgaggaagttaaatttaaaagtagaaggcaaagaattgaacatcctgacatattgattctttgaaaagaaatttagaactcatatctaacacacctgcctcagtctcccacagtgctgggattacaggtgtgagccaccgagcccagccctgaagtttcttttatagagcgaaaggttttaatgtttatgaagtaccctttatcaattttgttttttgtggattacttttacgccattatatttaagaactctttgcctaatccctatgtcccgggggttgaaatatttctgtatccctgggatatacaggttaggcaaacaggtttttgtttgtttgtttttttgtttgtttgtttttgttgttgttgttttggtgttttttttttttttaagacagattctcgctctgtcacccaggctagaatgcagtggtgcaatcttggctcactgcaacctccacctcccaggttcaagcaattcccatgcctcagcctcctgagtagccgggattacaggggcatgccaccatgcccggctaatttttgcatttttagtagagatgaggtttcaccatgttggccaggctggtcttgaactcttgggctcaagtgatccgccagactcggcttcccaaagtgctgggattacaggtgcgagccaccatgcccggccaaagagttcttacctgtaacagtgaaatatgtgggatgtagaaatataattgagttttgtttattgaccgtgtatcctacattctatttgatcattcctgttggaatacatataatgctatatttcctcaatcttaaaacagttcttctcttagcctcactttcatactagctgatgtttgttattttcccatgtttagattccagccatcctaggggctgtgaagaagcatcacactgtggttctgatttgcttgtctctaatgacaaataatgttgagcaccttttcctgtgcttcccagtgtttaaaacagcattttcaggctgaacgcagtgtctcacacctgtaattcattttgggaagccgaggtgggtggatcacttgaggccacgagtttgagaccagcctggccaacatggcgaaaccctgtctctactaaaaatacaaaatatgtagccaggcgtggtggtgcatgcctgtagtctcagctggttgggaggctaaggcaggagaatcacttgaacctgggtagtggcggttgcagtgagccaagattgcgccaccacattccagcctgggcaacagagtgagactgtctcaaaaaataaaataaaataaaataaaataaaataaaataaaataaaataaaataaaataaaataaaataaaatataaaatagcattttttgttttagatagagtctcactctgtggccaggttggagtacagtggtgtgatctcagctcactgcaacctctgcctcctgggttcaagcgattctcctgcctcagccttccgagtagctgggactacaggagtgtgccaccacacccagctaatttttgtattttttgtagagacggggtttcaccatgttggccaggatggtctccatctcttgacctcgtgatccacctgcctcagcctcccaaagtgctgggattacaggcatgagccaccacacccagcctaaaatagcatttttaaacaaaaatattgcacgtaaatgtaataaatttagatattaataagcattttcccagataaaaagattacatataaataaaaaacctggacgtgtgagagaatatttacagtgcttattttgacatgggattgtggataacttctatttcttacttttgcttacttgtcttttttatgggaatattcatcattttggaatgaaaaatttaactatgaactctaaaggca

SEQ ID NO: 93967 - DNA, 24517 bp, Homo sapiens
  misc_feature (1)...(24517): n = A,T,C or G
catcttttcctcgcattttttcaccatctttccctcaatctccaggagccaatgcgagactttggctccgattaagcgacggcccgagactcggggtgcgcgaggaggatcgacagagtggtgaggggacctaggagggcgggagtggcagaggtatgagagagagagaggtgagtgrgaggcgaagagtgagaggaaggcagggagaagctaggagatcggaaggcgtgggtcagggtgaatgacgtgaagtagacttgggaagggaaaagaggtggctttagatttgggaagcatggaggggagaggttaccgccgtacttagcagaagtgggctaagagatagaagataggaaggacgggcagatttggagcttgtagactggtctgaccaggatgggatggaagagagaggtgtgggctcaattttctttgtccctgtttagccaaagatgagacaagtcattgaaatacaaaatgatcttgcaaacactggacagttaacaattctgtcacttggtaattgagggaagactggagttgaagggcagaaatagggtgaggaggcaagaaagggagggagattggtcaggtttgggagaaaccagaggagatgagtgacatgggaaaggagaccacagaaaaggtggggttattgtggggactgatggatctggaatcagttagaaaggtcaggggtgacactggcatggatggtgaggttgcacttctgacgtttgcattcctcaggtgatggagagcaccccttcaaggggactgaaccgagtacacctacaatgcaggaatctgcaggaattcttagggggcctgagccctggggtattggaccgattgtatgggcaccctgccacatgtctggctgtcttcaggtgagaagccccttcatggcagggaaatgtaatggggtctgcggactggaataaaatatcataggtaaaagtgtagcagcctggagtcggggtggggactgggagcaagggttggaaattgctctaaagtgtggaggccaaaacagcaggactggtaaagttgtgctggagtgagatgagatgtttgagaggtaattgagggcagagatgcagatacaatgcagcttctgatactaacctttgacctctgtycctgtacagggagctcccatccttggctaaraactgggtgatgcggatgctctttytggagcagcctttgccacaggctgctgtagctctgtgggtaaagaaggaattcagcaagtaagtctcagccagatacaaatttctcaacagctacatttcccaaactgctgttccttggagcacttccaggaagtgttaatagatatatcacaaaacttaaaaataaatacatttgggaaactctgcatattgccttttcccttttatttatttcccagctgagatcttgctttcaaatgtatcttccctcttaaagagttatgtgtgatatctgtaatgaggctctgataagtaatgcagtaaagaatttgtcttaggaagatactaatttcactctgtggaacagtgttccaagggtcagcaagttcagaacaggcagagatggtggcttttatgggcctcctttttgttttccaaataccctactcacctctctgcttctgttccagggctcaggaggaaagtacagggctgctgagcggcctccggatctggcacacmcagctgctcccaggcgggctccagggcctcatcctcaaccccattttccgccagaacctccgcattgcccttctgggtgggtatgtcacttctctctcttcctaagctagggcaggggaactgctgcttattaaaccactaattaaactttgggagggggagctcctgggggcctccccagaaccttgtggtctccacgttgggaactcctttaggagtaagttggaccagatgtagtgtgtggtgtaggaaatgtcccccactcatggcccctgaggataagggtggaaagatggcagagggcagcaaggaacacagacagggttccttactctttttttgttgttctgttttgtttgtttttgagacagagtctcactctgtcaccaaggccagagtgcagtggtgtaatcttgactcacggcagcctctacctcctgggttcaagtgattctcctgcctcagcctcctgagtagctgggattacaggcacccacyacgacgccaggctaattttttgtatttttagtagagatggggtttcgccatgttggccaggctggtcttgaactcctgacctcaagtgatccgcccatctcggcctcccaaagtacagggattacaggtgtgagccactgcgcctggccagggttccttactcttggcccatcctggccgtagggggaaggcctggtctgatgacacaagtcagctgggaccagacaagcatgcccgggacgttccctcccttgacaagtacgccgaggagcgatgggaggtaagcacttgggagtgtgtgtgtctctgcttgtgcttcttcttcccatggcccttggggcatggtctccctgttctcttctgttcttcaggtggtcttgcacttcatggtgggctcccccagtgcagctgtcagccaggacttggctcagctcctcagccaggctgggctcatgaagaggtgaggaagccggaggtacagcagctctctgctgtgccatctccttgggttcctaagaaatggtatctggggctagtcaagatcagaggacattagctggaaaaggcaagctgagtagaatatagccagagataccaagaaaaaacgtgagtggacaagtggggatagtagtctttctctgcatatcaccatcattgtcccggtctttgtctctagtactgaacctggagagccgccctgcattacttscgctggcttccagttcctgttgctggacaccccggctcagctctggtactttatgttgcagtatttgcagacagcccaggtgaggaggcagggccacttaaccagcatgctctgctcctctcaggtctcactgagagactcctgcctacagactgttccctgattttctcttctctgtccctttcttcccattgtctccctcccatccctcctcctttgtctctgcctctttctccctagagccggggcatggacctggtagagattctctccttcctcttccagctcagcttctctactctgggcaaggtaagcagggggctgaaaggtatagagatgggaaggggaaagcaagttgtggggcagtagagtagactgagaagataagaatgaaaacagaacgaacagagatggagaaagaaagaatgaatgtatggggttgggggtgggtgggttgtgttttggaccccagctggaaacctctgttcctcaggattactctgtggaaggtatgagtgattctctgttgaacttcctgcaacatctgcgtgagtttgggcttgttttccagaggaaggtatgagcgcctagataagtggcttccagggaagaaacagggtggtgtgttgcctttgcctttaaaaaggagtggggtcttggggcagtagyaggaagcagttgccagaactgaatacttgggtctctcgggggagagaagttgggggttgaggttctgcatcttgggagggatctgatatttcaggcaggaagatgtaaggcagtgacttctgagacaaggcatctgcctttctattcttttcagaggaaatctcggcgttactaccccacacgcctggccatcaatctctcatcaggtgtctctggagctgggggcactgtgcatcagccaggtttcattgtcgtggaaaccaattaccgactgtatgcctacacgggtgaggcgggacagagggcccctggaagaggaggttgggggtgagggaatgccagtttatgttcgtgtttacctggcagtctacagagctctctgacatttctcatgacacttgaaagaagggcttgagggagtctgggtgtgggggtggcctcctcatcctctttctatccctggctcagagtcggagctgcagattgccctcattgccctcttctctgagatgctctatcggttccccaacatggtggtggcgcaggtgacccgggagagtgtgcagcaggcaatcgccagtggcatcacagcccagcaggtattcccacttgggagaggtggagcaggaagacaggctgcacttgggctgcgggggacaggggtcacattatggaaggctagctctgagtctgttataataggtggtggtgagttgtctgtgtttgaagagaaatgaaggctttgggtgtgagaataggtagacccttgaggggaaaaaaacatggagggaggaggtatagatctggatttgtgcctcggcactgccacatcctaactgcgtaaactagacatagttgttttgcctctgtgagcctcagtttcctcatctagtaaatgacagttcttacctcagggttgccgggataattcattggaagaataggggcaaagcattgagctcagcacctgtcatgcaataaatgctaaaaaaagaaaatagtagctgctgctattttaaagaaagaaaaacaaaacattactggaaagggcgaatgtgccagaaaaggaatatcccacgttgctgggagcagcaacgtgggataacagctgaactgggatgggtggagttgatgacaggagttatgagtttttagaataagctgatgttccagtgacattaggtgacagctcagatggctttcctgccttcttgctggagccctcatgccattcttgtctgttttcctagataatccatttcctaaggacaagagcccacccagtgatgctcaaacaggtatagacaggctccaagatgtcagaggctggcagctggtgatgacatgatggaaaagaaaaaggggcatccaaatctggggaagaaacagagggccgggttgtctggggcagtattctgagtccctacagtcaacccttgctccttgcagacacctgtgctgccccccaccatcaccgaccagatccggctctgggagctggaaagggacagactccggttcactgagggtgagtagcttctggtggccaagtcttggtcattggccagagaaagggcagacagttcagtctgcattttattttttacttcatggactaggagagaaaagctggcaagacagttttttgttgttttggggtgagtcggtagtaaacaaatcgtcccaaatcaatgcactttggatttggctaggtgagggaataattcacagtaatttgtattaggcctttctgaatatggctggatcacactggtgttaagatgaacccctgagcagacaagcatagagaattagtttgtaaaattgcggtgggggcaagcccagaccgcgtccagggctgccaccaaggagctggggggattcccaataggagctccgagcttcactttctcgtcttctccccgcgcccctcccgtcctgccgaccccaggtgtcctgtataaccagttcctgtcgcaagtggactttgagctgctgctggcccacgcgcgggagctgggcgtgctcgtgttcgagaactcggccaagcggctcatggtggtgaccccggccgggcacagcgacgtcaagcgcttttggaagcggcagaaacatagctcctgagagcgcgggacttggacacggacctcggcgggcgggactgggcggggcggggcatcagaactcaggtgttttttatttacgcgtcagggcttttcttgtttaataaagttatgatagctagcagtgcggtcccgggcgcctccccgtggggtttgccttcgcggcggactcgctcctctggtctacagcctttggaccggtagggagagggtggggccaaagccagctgctgcgcatgcgccggccggggccccgcccccatgcgccgcgcggctccagggccacgttccagggtcgggtttgrtggattcctcagtccctgccgccgcggggcgccctgggatagcggcggggcctcctggtgagcgcgcgccggggcggcctccgggaagtgggagacgctgcgggtcctgggcccaggccttgggatgggcgggaaggcytggccgcgccgggctgtgggcactgcaggaggcccctgtgcaggtggagatcgccgcggccctggcgggactcyttgctggctcttgggcgcgctgatgcccatcatctccctgagtttctgagccctatctctcatgtgtcagtggtcaccgccgaatccagacactccggccctgttccggaagagccctgatatccgtggctccatggygctgtctgtcgataccatgcactctagctctcaaggaggaaaggttttgtggaagggaatagagacttggaataacagacctgtgctaattagagacrggaaagatggaacaaggggagtgacccttctccacccccatatcctaatgtgctctctctctatccagaacagatctcggcccctttccaaacactcctgatgcctcatttgcctctcgcytcttttcgaccaccattttgggggctgaggcactcacggggcctccccaggtttyactccgtttctacacagtcggagccccatggatctcccatctcccggaggaaccgtgaagccaaacagaagcgcctgcgagagaagcaggckactctggaggctgagatagcargggagagcaaggttaggggtcagacagcttgtccttgggtttctgagacttgrgaggggctggaggagaccggctgaaatgcagtctggggtatactggatcccagcctcttctgctttctcttctcagtcacctgcagaatccattaaggcctggaggcctaaggagttagtattgtatgaaatccctacgaaacccggtgaaaagaaaggtaagtagaataagtaagaaggccttttctttcacatatgtgttgcccatttggcctgccgaaatgcagcctgggaacaagttcagtggttagtggagctctcctctgccttcacagatgtctctgggcccctgcctcctgcatacagcccccgatatgttgaggctgcctggtacccgtggtgggtacgagagggcttcttcaaaccagaatatcaggttagtatctggcagggaggggtcctaaattgtctccaggacagagtggcccttgaatacaactggacctcagagttgagctcacattgtagaccttgtcttctttctggctctggtgtctccaaagatttctcttggcaggttccccctggccaattccctcctctccactctcctcttatttgcaggacagttcttccttgaagttctttctgttctggagacagtagagggtgctctttccccaatccaattctctcttgcccctttgactttttttcttcctctaggcccggctgccccaagctacaggggagaccttttccatgtgtatcccacctcccaatgtcactggctccctgcacattggccacgcactcacggtggccatacaggatgccctcgtgcgctggtgagaggggagtgggggctgcttgagttcttggaagggaaataggaagggcaggaatgagtgaggataaacatttaagctcaggggctcacaggagggcatttttgttgcaggcaccggatgcgtggggatcaagtgctgtgggtccctggttcagatcatgcaggaattgctacacaagtatgtcttttgttacctgttccttttcttgggcaaaagcaatttcttcccccaaagcaacctgactctgttcatttgccctgaatcyaactgcaggctgtggtggagaaacaactgtggaaggaacggggagtgaggagacatgagctgagccgggaggccttccttagggaggtgtggcagtggaaggaggcgtgagtatgatgggcaggactcggggggcccagatggcagatttggtttcttgcctcccaccactatcactcctgacttgtaatccttggctcttcccgacacagctctgacttcctcagagatggaagctctggagcctgttaacatttggtggagtttctaagccttatgtgtgtggatattatatatgcattagaatattcktgtgtgtgtgtgtgtgtgtrtatttttatatatatatatatattttctttctctttacttaccccaatttctcttgtctaaatctcaccttcttccactcgcccattcccacctttcaattcccatggaattaccctcattcttctgggtctgttatctcatgccatctctgtgaagcatccttggatttcccacaatatggctrtccctcctctcttcctatagaatcttttgcctcttttaatatcttagaaaaccccatactgggtttgtaagtccatttctattagcctctagaggctagatcaatgccatcctcacttgattttcctccaacacctggcattgctgggggcatcgctgggcctggtacataggaagtgcttgggaagtgtttgctgacaaggatctctctgggcacaggaaaggtggagagatctgtgagcagctgcgagctctgggtgcctccctggactgggatcgagagtgttttaccatggatgttgtgagtgttctgtgccttggtccctgtgagtgatgggcgatgtttagggatctgtgtggggcagggaggmagcaatgcctgggtccctgagcagggtgatgggctgagaagtggctcttagaggtggacactcaggtcattccagggctcctcagtggctgtgactgaagcttttgtgcggctctacaaggcggggttgctgtaccggaaccatcagcttgtcaactggtcatgtgctttaagatcagccatctcggacattgaggtgaggcggagagagggaagcaggtttgtgagagctctgaggcagagtggtcaatgattaagagctcagactctggagccagggtgcctggattcaaatctgatgcctgcctgttacagctgtgtggcttttggcaggccgtttagtctctttaagcctcagcttcctcagtctgtaaattagagatgatggaatgcttgcatcgtgggggtgttgtaaaaattaaatgagaattcacataggtgcttggcaagatacctggccatggcttaagtgctcagtgaatatttattagaagtgtgactgcacgagcattgggtgagggcagagggaggtagctcccgaatcctccaaatggcttttagatggattgcagggaggctgggcagatggatgagtggcagagtgaagcctgggcatgagccttgcagaaaggctgccctctgacccagctttctcggtgyctccaggtggagaaccggcccctgcctggccacacacagcttcgactgcctggctgccccacccccgtgtcttttggcctcctattttctgttgccttccccgtggatggagagcctggtgagcatagtactctgcagggtcacccgtttacctccatttttcctgttttctgragcccatgttgggctgctaggaacccatcagtccatctctcacatgwaccttggtagtgttcacctcagcgtgggcacttacccagggtcttctgggggatgtacaaaaagtgcatgtggtcactgccctttgagagtgtggtgtgattcttcaggagtgcgctacccaggaaagagatcagttctaaggtatgttttgttttgtttgtttgtttgtttgttttgagacagagtctcactctgtcacccaggctgcagtgcaatggcacgatctcggctcctgcaacctctgcttcccaggttcaagcgattctcctgtctcagcctcctgagtagctgggattacaggcgcgtgccaccaggcctggctaatttttgtatttttagtagagacggggtttcaccatgttggtcaggttggtctcgaactcctgacctcgtgatctgcccgccttggcctcccaaagtgctgggattaygggcgtgagccactgcacctggcctctaaggtgtggtttttacggtaaatgttctgaagagctcagagaaagggaagacagatgagctggaattgtcagtggaagcttcttgtaggagctggtgctccccctgaggaatgtacagcatttgtgattaggacactgagaatccccagtgtcctctgggcacccagcaagaattctattatagttgctttaattaatgctgcccccatttcttccatgcaaattatcagggaattctttagcaccagagaccctctcagacctctggtcatcagcttatgggaaaccctgggttcctataaacactgctcctacttttttctagtcactcctgggggcctcttccaccttgactactccctgccccttcccctttccagttctactgcctttagctatgttggcagtgagaggtgaggatgatgaccagctgtaagtgtttaaatgtttatcttcagatgcagaggttgtggtaggaaccacaaggccagagacgctgcctggagatgtggctgtggccgttcatccagacgactcgcgatacacagtaatacccagtgcgctcctgcactctggccygcccyrccaatggccttctcttctcttgggttttaaatggtggctctttctctcttgcttctacttccttttcctgagacttctctcagtggttctgattggactccctcctcctcttatagtttttctgtagctcaggggttgacaaactggcccatggtcctaatccagcttgcggcctttttttttgagacagagtctcsctctgtcaccaaggctggagggcagtggtgtgatcttggctcactgcaacctccacctcctgggttcaagcaattctcctgcctcagcctcctgagtagctgggagcgtggcaccatgccckgcacgtgccaccacacccagctaattttttgtatttttacaaaaattagtaattaattttttttaagtaatgtaatttttaagtaatgttatttagtagagacggagtgtcactgtgttagccaggatagtctcgatctcctgacctcgtgatctgcccacctcggcctcccaaagtgctgggattacaggcgtgagccgccgcgcctggctgcttgcagcctttatattatctatggctgctattatataccctctccagctctgctgcagtggcataatagagtaattgtgctgagaatgaatttgtctctaggcccaaaagcctaaaatatctacattctggccccttaagagtttgctgaccttgctctagcttgctaccttccactttctaccttcttattcctggggttctcacgccccagcccagacccttccaaccctcacaggtgcctgtccttgatccctctcccttcccttcagcatctacacgggcgacagcttcgtcaccccttgatggggcagcctcttcccctcatcacagactatgctgttcagccacatgtgggcacgggtgagtggaagtcaggggagggagagaaagttgggggtcctggaggagaggggagggaaccaggaggaagaggaaggtgggagtgggagatcctcatatagggtggtctgagtggggaatgggagggaggcacagacagagaaagtcgcaggggctggggcggtgcaggtgatggggcggtgcaggtgatgatgatacatctggaaaagcaaaagccaaggtcaggttcagtactcaccatggctgtgctccccaaggggcagtgaaggtgactccagctcacagtcctgccgatgctgagatgggggcccgacatggcttgagccccttgaatgtcattgcggaggatgggaccatgacctcyctctgcggggactggytgcaggtggtaccaccctatgttaccccatcctttgggggctctctgtccccctaatcctcctcctagtttcttatttctctagaggccttcagtctttactcttgccgctttttctccagggtcttcaccggtttgtggcccgggaaaagataatgtctgtgctgagtgaayggggcctrttccggggcctccagaaccaccccatggtactgcccatctgcaggtaacctcattttaactcctttactaagggctaccccaaaagggaatgtatggagcttaagggtgacaataggatgggctctgcacccctccgttagaatacgagctccgtgtcggttttattcrctattgtatcctcagtaccaagggcctggcatggcatggggtcttgtgsccctgggagaagtcacagggccggaagagcagtggactcaccctgtctctctttcagccgttctggggatgtgatagaatacctgctgaagaaccagtggtttgtccgctgccaggaaatgggggcccgagctgccaaggtgaggctgcagtgtaggaaggactggggccaggggttgggggagctccctgagaattggaatgaagaaatgggaagcaggagacctcctgccctgaagacctctccagctgtggtaactgagaggatgtgtgggatggaggctgggcggcccagcaagggctggctcatatccttactcaagcccagaatcttggcaagaggcttgggaggtcctttctgagttttaaaatgacctcagaggccactygtcctatctgtggaggtgcggccgtgcaggaagggcaacattgtctaaagtccccttyctctccaggctgtggagtcgggggccctggagctcagtccctycttccaccagaagaactggcagcactggttttcccatattgggtaagggtagggtaaggggagctcttgtggagatggggaggggggactgactggttattctaagacttcacgaatgtcctcccggcagggactggtgtgtctcccggcagctgtggtggggccatcagattccagcctacctggttgtagaggaccatgcgcaggtgggtaggaagaagcacccggagggccgagtgtggcncagagcacctagcccaggagtcagagctccgcagggccaagtcccgctcctgcctggtcatgtgcttcatgctcatagtcatgtaaccttctgcgcgatcaaggctccctgaagtggcatttctttatctcacccctggrggaacctggccactctaagaccacatgaggaygtraaaaccaagtgacatttacacctgtcagctgttcttcctcactctccccaaccccttcctacttttgcagggagaagaggactgttgggtggtygggcggtcagaggctgaggccagagaggtagcagcggaactgacagggaggccaggggcagagctgaccctggagaggggtgagtgcctgagctggggagggatgtacaggggagcgggggcctgggcatctgggcctttgaggggaacagatcccaagatacagaaggtagggtcaggaaagttgggaatggagccaaaggggacagccctggtctctgggggtgggggttggcctagaatggtggcagcagtggtctgaggtcctagaagccaaggttccaactgtccccattctttttctgtttcccagatcctgatgtcctagacacatggttttcttctgccctgttccccttttctgccctgggctggccccaagaggtgaggtgggttgagagggcgaaagtgaaggggaaacgataaggaagggatggctgggcccccacagaggcttgaggggggcctggggcctgggcctcttactgctcctcttccccctagaccccagaccttgctcgtttctaccccctgtcacttttggaaacgggcagcgaccttctgctgttctgggtgggccgcatggtcatgttggggacccagctcacagggcagctgcccttcagcaaggtaagagcccttcagtgccctgccgctttctgtgacnccagtgttccccaaaccttgtcctcccttctaacccctaatgtggtcctttccacgttgctgattcctttttcctaattcacttcctaccctacccccaaaagtatggaggccagagatcccaaggcacctccaaggaarcccccctctgytgacccctccctgcccccaggtgcttcttcatcccatggttcgggacaggcagggccggaagatgagcaagtccctggggaatgtgctggacccaagagacatcatcagtggggtggagatgcaggtgaggacgaagcacccactagagggacaaggtttgcagggtttgcaggagagaggaaggcaggctgagggaggagtgaggccagcaggtgtgacccttntagaggcagggccttcgacctgggtcgtgaattgcccccttccatccccagktgctgcaggaaaagctgagaagcggaaatttggaccctgcagagctggccattgtggctgcagcacaggtgagtcatcgctgcctkccccccaccagctctagctcaccacctctggcttcctctgcaacccaggtcctggccctgcagccacaaaggcatctgccacccttcttcttcctctggttgcagaaaaaggactttcctcacgggatccctgagtgtgggacagatgccctgagattcacactctgctcccatggagttcagggtaagcctgggcgaggggtgtcggggtgagcagagrgcagcgggcacctgtgcaggggcagggcaggggcaggacttctggtgctgctgccacctacatgcagactacctcgattctycccttccagcgggcgacttgcacctgtcagtctctgaggtccagagctgccgacatttctgcaacaagatctggaatgctcttcgctttatcctcaatgctttaggggagaaatttgtgccacagcctgctgaggaggtaagagaaaacagaggtgcttgggagtagggtagtcaggtgtcagagggccaaggtggcatctggaaggaaaggaggcaggggagggggagtcaggccatcctgccccctctgcctgcagctgtctccctcctccccgatggatgcctggatcctgagccgccttgccctggctgcccaggagtgtgagcggggcttcctcacccgagagctctcgctygtcactcatgccctgcaccacttctggcttcacaacctctgtgacgtctacctggtgagtgaggctgggggaggcttggtattcccatgcctgcttctaattcctctggaaatttccaaggcagagagctctggagttaataagttcccaattgtcccctcagttaggagaggagaggagacgagggagtctcagttcccctcttcctgggactggttttggcagtgcagcccaggcactgttgcctgcctgtcacctggggagaggaggaggagggagacttctagaaatgtctgacaagtcggtgtcagaaggcagaggggaattttttcagtccctgtagttgctgagtttggcccatgggcaggctgcgtgctgagagaggcctgggagggactagcagcggtctttagaccaggggttctcacgctgtcctacgtccaaagcacctggagggcttgttgacbgtggatcccccccgctccactgccaccccagagtggctcctttagcaggttggggtgggggtgggtggtgtaatgaatattcatttcttgtcccaagtggtgctgctgctgctggctgtggaccactgccctagctcagccttttaaaaacctctgtcccctgttgataagcaaaaaactcaatgatttttttccctaaactacatgtttccctggaaatcctgtccctgtgtactgcagagaattgctgtcctggagtccccttctttgtgctgagtgtgtcctgggactgtggatcatatcagaagtgctaagtgcttctgcctgtccctctctcccaggacccatggcctgccccrctggcgggtagcagtggctgtagggaggagggctgtggccctggacctgtcctctgaccattggcttcctctccaggaggctgtgaagcccgtgctgtggcactcgccccgccccctggggccccctcaggtcctgttctcctgcgctgacctcggcctccgcctcctggccccactgatgcccttcctggctgaagagctctggcagaggctgccccccaggcctggttgcccccctgcccccagcatctcggttgccccctacccyagcgcctgcagcttggtgagtcccaagcaccttggagtgggtctgtgggtgaatsggggggagcaccttctgaaggggtttgctgcagggggctcatctgcaggaatggttcgtactttactgtggagccctggggaagatggattgttcctgcagggttgctgcgatgaccctagggtcttgagggacagtattagcrtagtgctcaagagcaggactctgttgctagactgctatttttgagctgtgtgatcgagcctcagtttcccscatgtttaaactaggaacagtaatagtatatgttatggttgtgatgagggttggataagttagtaatagggtgtccccaaaatctcagtgcagctttaataacttcagaaggataaatgctatgaactcacccaaaaattattttaaaatttaactatttaaatttatacttatttggttttgagttttgactaattcattttaaattctaatttatttttggttggccatttcaatcacagcaactaaacaggcatcaaacactgatcatctaaaacctcttaaatgacgcctcactttttgtcatgttccttgagatagtggattttctgtggtgctgaggacagatctcattgccctaaggagatggggtggatgggtcgagaagagagccagcagggttggtactgagtctcccaggagcccctttgccaattctgggtcccccccattgccaggagcactggcgccagccagagctggagcggcgcttctcccgggtccaagaggtcgtgcaggtgctaagggctctccragccacgtaccagctcaccaaagcccggccccgaggtgaggcaaggcgggtcctgggctcggatccctgcaggaaaagggggctggtggggaaaagagsagagcctgaagggccaacccccccrttaggaggtgcagggtaggaagggaggcaggagctgaggccttgcccctgacagtttctttctttccagtgctgctgcagagctcagagcctggggaccagggcctcttcgaggccttcttggagcccctgggcaccctgggctactgtggggctgtgggcctgttacccccaggcrcagcagctccctccggctgggcccaggctccactcagtgacacggctcaagtctacatggagctgcaggtgaccagaggggatggggagggttagggcaggcttgggaagcatgctgggaggaagggaggggctgggctctataaagtaggggaagggaccttctaatggaggatggaggcctggcagcaggcggatgtctgagccttttctccctgttcttccccagggcctggtggacccgcagatccagctacctctgttagccgcccgaaggtacaagttgcagaagcagcttgayagcctcacagccaggaccccatcagaaggggaggcagggactcagaggcaacaaaaggtaaggctgagggaggcccccagaaggctccacccctgagggaatntgggccaggaggggcctcattcctggatcctcacctccttttctcctcgtccagctttcttccctccagctggaattgtcaaaactggacaaggcagcctctcacctccrgcagctgatggatgagcctccagccccagggagcccggagctctaactcatcatccccatcagttttcctccctctcagacctgtctttgaggacaaacagatttgtcagctgtcagggtgcagtgggacgtcagagactatgtggtccatcgccttcattgtgtaaatgaggacacagactggcttggtcgcagtgactgtggtgtccttgagatgctcacattactgcccggcctgcctcccacctggaagtctgggaatgaggagattgagataaacttttgaaatcccaaacatgtctgtttatggctctttggtcccctttgctcccagtggtgacttttgtgcttctgagttgtcccctgagagcttggtctgggaaaagaggaggaggggtcctcrctggaggaagaggaactttctagtcatgggtagggtatgggcacagtggttccggttctacctmctttctggactaactgacagtgccctggcttttgcaggctctttctcctccacttctcactaaatggaagcttccccgctccttggctgtatccctagaggtgctgagagaagtaggacttcctccagacctgatgggctgcaggctgtgctgcagatggtgtgcccccaccttctgtgctctgacacctgagtgcccagcctctgagttacacattcacagcacagccagccaccttacccacgccaaacaccatctcatctccatggaattcaagggcctggcccttccacgcccagagtacattctgtccagcagctctgagtagcctgtcctgggctgggtcctctatggtgctagatgtacaatgccatttaatcctactgaaaacctcatgaggcgggtgttagctccattttggagatttttatttttactttatttttgggacagggtctcgctctgttgctcaggctggagtgcagtggcataatcatggctcactgtagcctcaacctccagggctctagtgatcctcctgcctcagacttctgagtagctgggaccacaggtgtgcaccactgtgccctgctactttttttttttttttttttttggaaacggagtcttgctttgtcacctaggctggagtgcactggtgagatcttggctcactgcaacctctacctctctggtacaagtgattctcctgccttagcctcttgagtagctgggattacagttgtctgtcaccacgcccagctaaattttttttgtatttttagtagagacaaggtttcaccatgttggccaggctggttttgaactcctgacctcaagtgatctgcctgcctyggcctcccaaaatgcttggattacaggcatgagccaccatgcccagccctgccctgctaatttttaaaattgttctgtagagatagggttttgccatgttggccagggtggtcttgaacttctgggctcaaataatccacctgccttggcctcccaaggtgttgggattacaagcataagccactgcgcccagcccccattttggagatgaagacgtgtgctcagagaaaagtctccactgggacctaacccaataaattaggtgcaggctctttctggctgctgtaactaaacttcaaatataatggtggcttagatgaggtggatgtttcttctgctgggcataagtagtgcagagatctgcaataatgggagcccacacctccttcaatcttattttcctgccattctgatgcattgtcaaacttcatgtccaaggtctgcaccagctcccatcaccgtgtctgcatttccacccagagggaggagggaaagaaggggatgggcagttttctttttctttttactctgtttcagcaaggtgttttttttttttttttttttttttttttgagcacctgctatggatgggctgggccttattctggacacttagattcatcagtgagtgaaacaaaattctgtgcccttgtagtactttccttctagcaggacagtcagaaataacatacaaatgagtgaacgatatactatgtttgaatgtcatgaatgcaggggagggaaaaaggatagaacaaggtaaggggactctaatgtgtttgtgtggcggggggcaggttgtacttttaaatagtgggtcagggcagaactcactgtaaaggtgaggtttaagcaaaggcttgtaggaggtataggaagagcgttccagacaaagggaagggccagaggaaaacagatagaggcatggtcagacagctcgaggagtagcctggagaccagtgtggtggggcagagtgagaaggggaggatggtgggaggtggagaaacagaggtgagggtggggaattggtggggggtagggaagactcaaggcggacaatctggggcttgtgtccaaaatggtagccagttggctacctaaagcattaaataaaataaaaacgttcagtttcttagtcgtacttgccatatttcaagtgttttggtagttgcatgtggccagtggctactatgttcgtcagcacggttataaaacatttccatcatcacagaaagttctattggaaagcactgatctaagaccttataggctgtttcaagaactttgcttttcctcctctgaaatggaagctcctttcttttcaaggatactaccagaaagttgcccacctcctttctacttgcatcctattggacagaacgtgatcacatggccacagctagctgcaagggaggctgggaaatgtaatgatccacatgctgagttgaaatctacatgactatccaaaaggaggaggatggctgttaggggggccagttagcagtctctgccacccccaggtctggtgaaccccaaagcactcttcactgcactgctctgttttgagccttgggagacaattctttgagaaaaataatctggaaatcacatcctggtgatctcaggccctgaagtctaggaaccaggttgaggtgcatttagctgtctgctctaccaacctcttggacattcagatatccagtcccccaacttgtttggggatcctcacagctgccccatgggcgtcacctgcccactactgcaggctaggggcaagtcataaaatactagtctcctttggagccccctgctacctctccttgggggctaattgtcccaggacagttgtgaaggaaggtagaccaattttttaagtgttttttttccaccctgccattttctatgctcccctcatcttcagtgatgctccatactgaactcttgttgtcttctgtctccaaaggagtcagtctccaatttcatatggagataatggagggttgtgtaggtgtggggggcagagtgggtaccacagaggacagagagcaatcctatcagtaccccccactgctcaagtctgagctgcaagtttgtgttttgagagctggtgagaagtcaattttttttttttttttttttttgagacagagtcttgctctgtagtccaggctggagtgcatggtcttggctcactacagcctctgcttcccaggttcaagcaattctgcctcagctccccgaagtagctgggactacaggcacatgccaccatgtccagctaatttttgtgtttttagtagagatggcgtttcaccatgttggccaggctggtcttgaactcctgacctcaggtgatccacctgacttggcctcccaaagtgctgggattacaggcgtgagtgagccactgcgcctggccaagataatcttgagaaggtggtcaggagtgcctgcctcagaaatcagcataaggaggaccctgaaccccaggggactaggagttatatgttgggaccaggtttccatcctaacagcaatccctaccatcctgccgacgacctataagacaggctgtgatatgtccctaagtagcttccctgtgtgatcctcacaacaacctgatggtgcaggaataatgagaaaaactcagaattgtgtaaaaacaaaacaaaacaacaacaacaaaaaccttcccccaaactgggagggagctgagaggccaaaaagtgactcagacaagtccagcttggtgagtagatgagttttttaggacttacatacaaggcactcctggatggcagcaggacagctttagagatccgtgctgcctcccatgctaaagctgctttcaagctaattttctgactctgccgactgtgtgtgtgcgaatggactgttttccttggtgggttcccagatactctccgggatgtttgggttctcagggacacctgctcctcggccaggcaccgtgaccttggctcgccacctggccttcaggattcaggcagtggcatacaccgttaagtaacctggtaggggacctgtcacactacagcaggtaccatcattgttcccattttgcgagtgaagaaatggaggctccaagaggataagaaacatgcccaggaattcacatgtgggctggtgtcacctcatactcacatggttaaccaggacaggctcagcttgcacctggcctctcctccccagcacttgcgcctggctgggcatcctctcacaagctgaacccgtcatctctcacctgagtgcccacccacctcccaccccaattacctgtgtggatccatgggccaggggaaccatgtcctgggggtgttctgcctatgtctctttctttggtttttgagcccctggccccaatgcttaagcaaagggaaatgaaataaaaatcttgcttaaaccaagacctctgtctagtgcctgacttctccactgctattagatctcaggtgagtgacttgccctctctgagcttcaatttccttatctgtaaaataggataatgatacctagtatgccacattcaagactgctgcaagcatcgaaatagggatgcaggagaaaagcaggacttcaataaatgttgcttctctttattcccaggtgttccaaagatctcaatttggtgtgtgttcctatgcatgcgtatatgtgtgtggtgtgtgtgtccccaaacaactccccagatgccttgtaggcctgtgacactggtgttgagggagacattgtccatccctggaaccctctgctcaacagggggacagtcagagacttgagcatccaayccccacttcctgccagctctgtgctcagggacccacagagtcaagcaagttattgaattcagcataccgaattttatttattgccactcaggagggtgggggcctgctgaaagacagggtcggggcctgcctcctgcatccccggcccaaaagcccgggccaagaaggacacaggcttcaatggctgtcatgtgttgcagacaacatggtgttgagatcttgcatggtggagggtgacgctggtccctgaagggagatggaggaggaggcagagctgggaacaaagggttaaagggcgcsatgtaagagagctctccattcccaccacggagacatccagaccccagcagaggcccaaactgactcacaaacacacagccccatctttccccttccaaagaactaccttttcaagcaattccaggaagctggactcataggaggaatttgtcagaaaagactccttcagcttcagttgcaaagtcatacccggccctgcggatccagaagtacagcttaggacccagcagtcagggctgattcctccggagacacagaaccttcctgctcacgctccccggcacagttcctcttccccagcaatgcccctccagagcctcttggaagctcaggactggggtgtctctgtcactctcagggaccatgaagtcccaccccttttctctggcctcttcttgccacagggacccaggagtcctgccctctagccctcacctgttccatgtgagctgccaaggagggtcaagaggaggacaaggggcagcccagaccccatagtggccactgcgctcctgggatggaggagacactgaagtcccggtggcctctccttaacaggcctgtttctacaccccactcaagccttagcataagtgtttgaggggaaatgggaggaggaatctggtcaactggattttccagttctcccagtaagagaggacccaggagaggaccattcactgtgcttttggggaaaatagaaggaagtcccctctcttccactctgtgtcccacccctcccttgtgtctccaggtttgagggagtgagtgckggtcctacagacagggaaatggagagggaagcggggaccagggaggcgtccctcctgcaggtgtctgggcccccacccatgccygggcctcccaaggatctttagagattaattattaactgcagctaattttcatcattcttgacaccgaagggctcaggaatgtgggcccaaaagggaggggtggattaagccaagtttcttccagaacccaggtgtcctgctccctcaggtttttttttttttaaacactagtcaagtgcagtagtgaaaagaggagaaggagtagaacaaggagttgggtctataatggactgtgaacactgcttccccagccttggtggctttctagatgagaaatctggtcatgggaacttccattgctgaacattctgttttacttgctctaacgcatcctggay

SEQ ID NO: 93968 - DNA, 23642 bp, Homo sapiens
atctgctgggctctccctccaccttgtgtcttcccgagcctctgccaagcccacctcactggtacccctgacctttgttgttctttcaggaggagactcgaaagaagcccaagatgtccattgtggcgtccgcccagcctggcggtgagcccctgtgcaccgtggacgtgtgagggaggtggcacgggccagggcgcgggggccgccagccgcacttctgaggagaccagcagtcatgcatcgtgcaccacagtgtcaggcctccaacccacgctccttccctgtggccaacctgtgggcccggccttagggtggaggctttagtgtacagggacagccatggccacacagcacacatgtggagcagcggctctccctggaaagctccaggcctgaatggatggactcagcgactgcaccagtggcagctggtgactgtggacagtggtggaccctgcttctgtgcacctgctgcaggctctttttatgaaggctttcatgaattttagtatgtaatacgcactgacgacacatgatgcttggatgacagatgagaggggatggctgagtcctgtggctggcccgtgatgccaggtggcccatgtgcccagggcgcctgcagggctgctacagggacctggtcaggaggtgcacatggtgccctgccctcacccaccctctgtgtttccccttctttgaaaaggtagaagagaaaggaatattttaaacctttttggcttaaacagaattttagcatcagaactagctttctgggattggaggcaaaccatcaaggtggtccctctccagtctggacacgatgccagcaaggatgacgtcctgccacctcctggagttaccctggcctcctagggtccctttttctgatgaagtcttaattccctaaaagcgcctctttggacactgaggccctctctgcctttcctggcctccggcaacagttttttacaaagattttttgcagtcgagtccatatgtccacccattgatttttaaagcttttgtgatattttagcattttgaaagactttcacagtgagagtagaaggtagatttggaatcatgcattttagcaagtggacttgttgaaacaggaagcaagggccttcagtgtagcccattcttgatccagagctgttgcctgtgacagcggtttctctggatgtcaaaggcagctgcctggtgcccagcttgcttctcgactggtggcccctatgggtgggtgtgcgatggaaatgtgttcctgccggagtctgaggcaccagggtgtgctcaaaggctggccctggtggtggactggcacctgtgcagagtgccgtgtgcttgtggtgcgccatctgaagcaagagtccagcgttctgccgtgtctgtcccccaccatgccccctacaggcggtactgatggcgcttttttttttttttctgtcaggaaaacaatgttggcctgtgggccgcccacaacatatccttccctcactacctgtgtgaccaaggttggcttctgttgacctttaaaaaagaaaccctcaactcaaattgctataattagacacttgcttctgtcttgcctcctgtctgcagctgtgaatagtcatttgactgtgactgttgcccttagccagccagatgcgcctgtgaaccaaagcttcgtgcacatgtgttcccctaaaggttggggagcctcgctgtgtcttgctgttcccaggcaccaccacagcaggtgctgccatactcttgtggtctctgtgcgcccccccccccccccacccgtctgccaagcatgggtatgaatcgtgcacacagccatgcttcaaggccggggcaggggagcctgtgctgatgccatccagggcactgggctgtgcctggaaggcgagccttgattgtctgaacacataaagcaaactgtccagaagggaatggctgatgtctttattctgagggtgagaggctggcaccctgtggacccttgactggccagatcccctcctggggcctccctgcaggctggaccctgcctttgtaacagctgagcagcaccccagcatggccccttccttggttgatgccctctctgctgggctgagggccaggctggccacagaggggccaactctgcccagtgttctccaccccatgcccccagctggtgcagttcccagacctctctctgcctctcctcaagtttaagtatcaaatcgaacattcttttttaaagtaagctctgccctgactcccccagccatgcagagaggcttgcagagctgcctaggcctagtttggccctttccctggcacccaggccctgtgttcagacccctggctctcatcacagaaacaccctttgttgagcagttgtttattctggccctcacagccttggctagtccacaaaggccctggggatgggcaacaggctacaggaacccacctgtcttcctggtcagggcccctggcccctagcagcaggccaatcctggtggggcacagggttctgtgccctttggctgcctacctctgaatatcctggccagcaagccatgccttccccgcccctggggccctgggagcccttcagctcctgtccccataatgggtcctgggcctaggatgaggggaaggtcccagtttcttgtagggtgttatctgggggtcctggtgtgggttgagctggagggctgtggggccccaagacccctgtgccattggggtgctccaccctctcaaacaggatgagcatctcacagtgcggggtctgcgggaacaggtccactgccacagccttgaccggccggaagggaatgcccttcacccggttagatggggctctgcagaggctgtggggggaaaaggggggcgctaaggtcagccgataggctaatcaggggctcctgtgggagctgggggcttggtagcaggcctagcccccacccaggcccctgcagacactcactccacaaagttgcccatggctgcccgggggttgcatgagacgtacagcagccgcctgaggttcttagctctccggatggccaggatcaccttggaatctgaggaggcaaacaccagctgggtccccacagccagagagtgcataacatggtgagccaccccatgtgtcctcgttcccgtgccacctccttaagcaaaagccactcacgcaagccagcacggggtgggtccaggatggccacgaggtgctgggaggccagtctgctcaccagggtgggcaccaggtcctcggccctcccgcagtggaactccacattactcaactctgaagagatggcaccgtggcctgtcagagggccacatgccctcccagcagggccagccctggggaacccctagccaaagagcttgctcacttgctctacctgtcgggcagcccccaagccctggctgtggctgaggcttgcagcaggggtggcggctgcccccatccccacccccacccacggccttgccactcaccattgtcctgggcgttcacccgggcgtcctccacagcctctgggcatagctcgaccccaatgaccctctttaccttctgaaacaggaaagcgtggtgtcgccccacccagggaggggagtacatggggccctgtgggcagcaaagaggagctgggcctggggcatgatggagtcagctgtggtgactttgagctggggtcaatgggggtcttggggtggggagagggtgccctcagcagggcaggagggctcacccgggccagggccaggccaatggtgccggtgccacagcacacgtccagcaccatgctccccgcatccaattgggcccagtcctggatgactgtgtagagcacctcggctgcgggtgtgttcacctgggggcaggcggtgcccaggatgtcagtggctcctctcctgtggtgccactggtgccccgacgcccacattcctggtccctccatcctgccgggacctccggcgcccactccccaccttggtgcccaacgtcttccctgaccccaccttggaccagccttgctgatgccctcatccagcccctggctttaaaagccaagcccgtgctaagcacagcctcctccttgccccacttggttgagggctcatgaggccccgcaggccaataggctgtaccttccctgccccagcaagggggctttgcctcccacaactcacaccggggcccctggaatcacccaactgcagctcccacccccacacctagccctccaggaggtcctgccaggcctgtctccaaaaacggccgctccaggtccccacagccttcctgcagcagtgagcaaacagtgaaacagtatttcccagcccagaggccaccatggcctccctcctgccgagcccagagcagtgccctgtggtaatgcactgagggccactcctcatcctccctgtgacaagggccactgccgtgtgtacctctaggttatcccgagtcaaatcagtgatgaccaacctctttcttacttcaccctcccctgtggctcacctgcctggatactcccccaaatctcaccgcctgagcccactgttcccatcacgtcctgatggtgcgtcaggcctccctcaacatgtccccatgcccaccagggactcatggctacctggaagaaggcgtgtggagagatccggaaggtcagccctagcaggtcctcgtggatgcaccggtccccagccacatgctccaggggcaggccctcctggctaggagtctttctgtgggcgaaggtgcaggtccttcagtgtcacagtccctgcagggacctgccccgccccactcgggctccttaccgctgtccctcctccacgaagtagaggcaggtcactccactggccctgcctggccctgctgtgaagtgctgcgctagggaggtcttcagctctgccagctcctcagggctcagcttctggagtaagtggtgaaaagttcccatcaggctgtgctgaggcccacctaggctaggcaccctcccccagcagggcccccgttgagacctgggggtggaagtaggcaatggccatggcctggtggcggcggctggtgcgcacagtcagctgcttccagtggcctgtgtacgtctctgggtcgtatgccgagtatggagtggacctgtgggaatcacgagctggcccaagtgcccacaactgggcaagcagtccccctgctctctcctctggccacaccttccttcatctggctgaaatggcaggcactccagaattcccggggcaggatcaccaccctctgctcccacaccgcataggacttcccgggagccccgtcacaggtcctcaccggatgaactcctggaaggccttcaccacctgcttggtggcttcggggatgtgcacggtgtcaaacggggctgccacagcacacgtcccgcccttgtacttgccgagccgacagcccacggtgttatcctccccatccaccccgacgccaaccagaaactcacacttattacgatactcagtctgcagggagagagagctgcaccttaccctggctgcccagcgcttgggcctggaaaccctgatttccccacaggggctggcagtcaaacaagaggaacagctgacaactatgtgatgttaccagaagaaaacacaaagcagggagatcaacaggaagggtgagcaaaagcaaagtttttcaaaacccaggataggggtttgtggccaccgaagtctagtctgacctgctggggtgatggcctgaccccctccagcgggcagcaggccttgttgtgcttgtgcctctgctcgagcagccagggcagcaaggcacggttggtgctcccgatttccctgtaagaggagcagatcggtggttggactccacctactgcccccgacccatgccaggccactccccaaatgtccaggctcctgacccctcctttgggatgtcattgtgcccactgtgacgtgggtgtcttgctggctagctcccaaaggggccgccakatcctgtgctgggcctcccaactggtgcatggacaggctgaggaagcacaggccgggcagagccctggccaagaggggcgtcttgcgcccacactcacttggcaagtttctgcagcacctgctcgcactccagctgcttccgctcaagctgctcagcatagggcactgtccatagaggggtcaccacgtcggccactcgtgttactggtggctcactctcaccctcctgtcgcctcctcctggccatggggtcggccttgggccgggccaggcgcacactgagtgggcggcctttccagagggcaccatgcaaaacgcgcagggccttgtccctctctgcagcrctgcggaatgtcacaaaggcgcagggtggttgcccaaagagtttggttttgtggggctgcagaccaaagcggcccaggaagcgccggacgtcgctgaagctggcgtggcgaggcacgttctgcagctccagtttaaagatctcagargtaaacaagtcatccctgatgtagctgtagagcccgggctgaggccccggccctgtagccgccccagcgccctctttctccacctcctccagggctgccggggctgcagggggcaccgagacggtagggcagctcagggcactgctgytctcctggccacagctctccatgggcttcgggccctgtgtggggacagatggggtgctagggtgaggactaggccctgggggcctggccccccaagcttccttatgggacacccagacctccgtcggtgcactytgcactcagccctgcccctcccccagtctaccctcccgaccccattcccgtytcctttcctccccyatcgcacctgcctcgtccccacctattctctggcaggtttcctgacccaccccgcctcctcccaccccatccccgtctctacccagcgtctccccgcactctacctcgttgtcgaggttctcactcatcgcccaggcggttctccgcctagaccagggacgccatgggggccgcctggccacctcgtcctgggcctgtcacaagggaagtggcctgtcacaagggaagtgctcagaggggaggtgctcacagagccggtgcaacgccgcgaggtcgccgccacccccggcttcgccccaggcggggcgggactcgaacctgcgatgctcaggtccgggtctcaggcttggggctgtaccgcccgcccgccaggggcccgcgccggccgctcgcttcgccagccactcttagtccgccagcgcgtgcggcggaggccgagcgtctctatgatcctggcttctggcaacgtcatcgtcacgcgccggatccaacccccaaccactttagccagctctagmggcgcgcgtggccgggacggaagtgcgcgcgggkgtcgccgggagtgcgcgctcctctggctgacgggcgggccgggcatgcgccgcgggcgttttggcgggaagcgcggggcgggccggacaatgagagtgtccgcctcctgagccaataaagctgtactggttttgaatcgcggcgcgtttcccgccgctggggtcaggggtcraggttcgggtcgtggggcggagggaagagcgggcgggcgggaggcgccggcgccagacgcggagggaaggagctacgagtagccgccgagaggccgcggagccagcgacgaccgacccagccgagccgccgccgccgccgcgcccccatggcggccgccaaggtgccgccgggcccaagcggggacagggtgggcgggcggggccggggccgttatcagcggccacgtgggcggcccgcgccgccgccaccaacctccgccggcctgcaggctcggccgtctgctgggcctcggtggcgcggagtcggggcgcgtggggtttgggggctcgaggcctgcggagttggggcgtttgggggtgcaggctctgcagaggcctgggggctgcagggcccccgcgtgaccttggggtgggttggggagcggccgtcgccacgcgggacggccccagcctccaggaactggtgcgggcggcgggtttcctccggctcggcccacttggggctccccactagtacggtgcatttattctttccgtcgcccacgcagcacttcattcattcggttcttacgtctggaaccgccactggcctctgtggcagaagctcgcgttccwgcgtggggcacaggtcctagatgcgccgacccaggcggcggctttgttggctgcggtgtctggttgagtgcgggccgctgcagagccgcagtgctgtggggaacagtgaagagcagcgaaaagcttatgttttcttttccagtttgagtctagtggtgaagtcttgggtctcttacggacttctgggtgaccaaggcatgtgttctggaagactcgaacctaaaatatgattattggtgctctcttatcctctaaattgggccaggatttcatgactttcaccggtacaatttatctagttattaacttagttttctgaactgtgaaaaaattgctggcagagctgtgaatccagtgtaaatactagcagtcctgtagcgacttttttcgttttactaagcaagagcacaactatttcctaattagtmaaaactgaaagagttacattttgctttaaagtaayatttcaaaatctatttcgacccatcattgtgtcctttgatcttcacacagcaggtatcatctgcattttatggatgaggaagaaactgatgctcaaagagatgaggcagtttctgccaggccactctctgcaagtgttggcggcttgtagggtcccccatcagtctgtgcacagatctgattgatgtctgtgaatctgggggaggggccccaagttctggtgtctcactctgtgctcacatggagctgggcataaacgcagagctttcctagtgtggaagagtgggcctaatttcttgctttggggttgggcccatccttgtatctgaagtcccttcattgtcggagggctgaccactgcaggcactggttgggctctggttgtgagccagatccataggccagcagtgtaacctctttgtatctccacaggacactcatgaggaccatgatacttccactgagaatacagacgagtccaaccatgaccctcagtttgagccaatagtttctcttcctgagcaagaaattaaaacactggaagaagatgaagaggaactttttaaaatgtaagtaggctgatgtcccagaaataggactctttaaggttgaggttacaacttttatgggtgtccaggttttggcctgacttttaatcagactgaggctgcttaaagaaagggcctaaagttggtgactaatcccatgtggaaatttaacccgttcctttcatgaatcttcaccagatgcccttgctgccctgcagccagttgcatgaagggcatcccatcttgctgctctgtccactggcatggcggccccactgcccttttttgccactggcttctgaggatccagggagtcccttggttgagcagggggttttaagtttttgcagcatagacttctttggcatcgtgaagcttataaatcccccacccggtgtctgttgttgttgttgttttgagatggagtctcgctctgtcgcccaggctggagtgcagtggtgcgatcttggctcattgcaagctccgcctcccaggttcacgccattctcctgcctcagctggaactacaggcacccgccaccacgcccagctaattttttgtatttttagtagagacggagtttcaccgtattagccaggatggtctcgatctcctgacctcatgatctgcccaccccagcctcccaaagtgctgggattacaggcgtcagctaccgcgcccggcccacccttaatatacaacatgatgcttgcgataacacatgaaaataggtgatggtttagttattaaaaccacttaaaaaaattctgtacatgtgcttcttgacgctttcagttaagagctggctacagtggtgggtaccagccttgtgtcttgtgacagtgtcacagcaccacagagactgtggcctgtcgcctacactcaggattgcaacaaacatcatgtttagttacacacctcagtgaaaatgaggttgtagtttttccctgttcaagttcatggaatccccccatccttgaagttgctttaagagtccaggttaaggttttgttgctctggggtgggagagggaagcagagagagtcattcctactgtgagtttcctatccaaggaarggggccaggagggatacctgggaaaggagagctgtgtgtcaccctttggtcacagagggtgatggacatctccctgaaaccactgggtggccatggctccactctgctgatgcattgccgtagcccctgtttgggagtagctctttgctgtggtgaagtgcttgcctctgttccctcactgcccatgtcgggtgggaggtgctcctggtggcctgggcccaggcccttcctgagggaggtgaggccagcagggtgggcccgggtctttgcagtaaagctccaggggcatcctgttggggaaccctgtgagacagtctcttgccagaatcatgttggggcagagagcagagtcgtctgagagaggcaggcagagctgtgcacagagggagggcgccagcctgagccctgagtgcactgctggattctgggtgccctggtccccagcgggaggggctgctcctgggcaggagggccaggtgttggccagggcctgttgcctgattagaggcctgggcctcttctctgggtcatctgacctcagatgacccgcccgcctcagcctcccaaaatgctgggattacaggtgtgagccaccgcgtccggtcatctaattctcttggttgtggaagtggaattcaagatgacctggagttttttgggctgctgtgcttcctggtggtgtcgtgacagaggtccttggcctgcacctgatccatgttgtccctgcagatctctggggctggggtgctcttgcacagtgaccatgggacggagtcttgctctgttgcccaggctggagtgcagtggcgcgatcttggctcactgcaacctctgcctcccaggttcaagcaattttcctgcctcagcttcttgaatagctggggctataggcgcatgcctccatgcctggctgattttttgtatttttagtagagatggggtttcaccgagttagtcaggatggtctggatctcctgacctcatgatccacctgccttggcctcccaaagtgctggaattacaggcgtgagcccccgcgcctgctctctcttttttttttgagatggaatttcgctcttgctgcccaggctggtgcgcaatggtgtgatctcagctcgccgcaacctctgcctcccggcttcaagggattctcctgcctcagcctcccgagtagctgggattacaggcatgtgccaccacacccggctaaktttgtatttttagtagagagggggtttctccacgttggtcaggctggtctcgaactcccgacgtcaggtgatccacccacctcagcctcccaaagtgtgggattacaggcgtgggccactgtgccctgttttgttttgtttttttttaaaatagggtctcactctcacccaggctggagtgcagcagtggtatcatggctcactgcagccttgaactcctgcgctcaagggatcctcctccctctgcctcttgagtagctgagactacgggtgttagccatcatgtccagctaatttttatctttttgtagagatagtgtcttgctatgttgcccaggctggtccccactgagggaaatattgtgactgtaggagcagtggggcratctccactcactgtatcctctgcctcctgggctcaagtgattgtcgtgcctcagcctcctgagtagctgggattacaggcgtgcatcaccacactcagatgatttttgtatttgtagtagagatggggtttcaccatgttggccaggctggttttgaactcctaacctcagatgacctgcccgcctcggcctccccgaatgctgggattacaaatgagccaccgcgcccggtcgtctaattctcttggttgtggaaccggaattcaagatgacctggagtttgttgggctgctgcgctttctggtggtgttgtgacgggcagttcttggagcctgaagaagggctggggcgttcgtggaggcatggggtcctgcagtgcagagttgtcctgtgtcctcctgcgcaggccctgcatgtgggctgcaggtctgcactcttaacctcacggcttttcttgcaggcgggcaaaactgttccgatttgcctctgagaacgatctcccagaatggaaggagcgaggcactggtgacgtcaagctcctgaagcacaaggagaaaggggccatccgcctcctcatgcggagggacaagaccctgaagatctgtgccaaccactacagtaggtggcatgaacgaccacctcgacagtccccagcagcttggcctgggacctttgggaagattcagggctgattgggaactggggagcgtgttatttcatggagtgcaagtttgtggtgtgtttgttgaatttaaaaccagaaatacgtttttcagacgtgcctctgaactcagagcaggcccgcagcgaagcttagagcacacgggggtgtggagtcagccagacgggccctgatgggaggacgcagcgcccaggctgggctcgggacgaggagtgagtgctgcagggcgagggggtgctgtgtgtgtgtgtgtgtgtgtgtgtgtgtgtgtgtgtgtggtgtctggggggtgggggttggtgtctggggggggttaatggggggtatgtgtagtatctagggggctgtggtgtctactggtggtggtgtataggggtgtgtggttcggtgtgtgtggtgtctggggcagggggctgtgtggtgtctgaaggtgtgtggtgtctggggcgggggttgtgtggttgggtgtggtgtytgggggtgtgtagttggtctggtgtctggggggtstggtggggtatgtggttgggtgtggtgtctggcgggggtggytgggggtgtgtggttgggggtctggtgtctgggtgtttggtgtttggggtgtgtatgtggtgtctgggggtgtgtgtagtgtctgaaggtgtgtggtctggggggctgtgtggtgtctgaaggtgtgtcggggcatgtgtggtgtctgaaggtgtgtggtgtctggggaggtgtacagtgtgtggtgtctrgggggcgggtgtggtatccggggtgtstgtaggggtcatctggtgtttggtgtctaggggggtttgtggtgtctraggggtgtggttgggtgtgtgtgktgtctgggggtgttggggtgtgtggtgtctgggggtgttggggtgtgtggtgtctgggggkgttggggtgtgtgktgtctgggggtgttggggtgtgtggtgttggggggggtgtgtggtgtctgggggkgtttggtgtctgagggggtgcggtatcgcggtgggggtgtgtgtgagagagattgggggtgttcgggcagtgtaagagcagatgtgtgaggtgcccaggcaccagcctccccagttatggtgtgttctaccctcaccaggatcttcctggggaggaaacgggaggggaacggggctgagaaggtggccaggtcctgggcgcctctgaagctacataagtagaggcccttgggcaggttcagccaagagctccagccaccctgtgaggggtccagcctggcctgcaaagaagtggcagtaggttgtcctgagtatggctggctgccagctgtctttagattgaacctgcactgcccagcttgttggcatgtttggaagtacacttgtcctggggtgtcccttggtaagcttcctagtgtcgtttgctgagtgtcatgcgtgtccggcggggcagggtccctcatcccaggtgcaggatgactgctggcaggagcctgagtggctcagcccttgagggcgatgcagaggggtgggtggtggtctgcctatgccatgggcacctcactgcacggcctggcctgccagacttccttgggaactggctcctgggttcccctccctccctgctcagcatgtctagtcctggggaagcttgcactctggctggtcctcctcctcgagccgtttgaatcatttccttgggggtcttccctgatgccctgtgctgctcccagagcctgggtcaggttktgggttgttgtgtgtgcatcataagttggttctgggctcctgggcatctgggcagagccatctgtgtagccagcagtgtcttgtgcccatcatgggcccttggtagacagggaaagtggcagtgggtagaggctggcttctgggtaaggtgtcgaagaggctgtgggctgggtcggggcggggtgtgaagggggcatgcagggggcttggcatccgctgtggcaggctgcagtagacgagacccccccccagctcccagttcagatagtgacgtgtaggggtatcctgggggtgcatgtggcctggactgggcatgggcacctgggatggtctgggttctcagggagctgttctgaagagtggtcacctgcagggccatctccccttggggctgcctgtgcctggggagttggggtggaggcgtccattgcaggccgtggctctgtctcctgtgccctccaggcttcagtcatggggatgcaggtgggcactcctgcatcaatcatggggatgcatggccacggcccccagtgggctcccttctggcaactgccccactttctagccttctgctgccccccactttcagataggctggctctatgtgttgggttcccttaggaaagactgggccccctgggccttgtgccctgatatctgaccctgggcttctgacttcacggccagggtcagaatcaaggggatcagggttgggcttgagtgcagccctgggatacagctggggcctgctttgccagctctgcttctctgcatttctggaggtgggggtcygtgtgccaagtgatcttgaacacagctcaggagctcctcgtggagatggccttacggtcagggaacaggtgcccattcctatttaggatggtcctggttttaagtgaatatggaggattttcaaagaggtttgaataaaactcaggcgccgtggtactttgtctaagcctggttctccaaccccagactgtccccgtgttgtctgaagcagacccctcaggttggtgagcwgggtgctctgtggccgagggctgggtgggctggcctttgcagtcatctcaccatcttcacgagcttctctctcttcagtcacgccgatgatggagctgaagcccaacgcaggtagcgaccgtgcctgggtctggaacacccacgctgacttygccgacgagtgccccaagccagagctgctggccatccgcttcctgaatgctgagagtgagccaagggccctggggacctgcctgacttggggctcacctgcgtggcagcgtggcgggttatgtgcaacaaatgctgttgccttttggggagagggggcagtaactgggaagtgtgtcgtgtgggctgccctgccctgctgtttgggggccatgcccagactgaagccatgagcagcgccttcccccttaaactcaaagctgtgccaagtagctggtgaacagcagtgcccgctcagccgccttgtggctggcactttggtttgctctccaagctccggttcccattagktgttgcggagcctgaggcccaacccagggcttcctcccagtgctgatcctcgtgccaggcttctggttcactggggccaggggcccctcatggttgcctgggtgccagcaggggctgggcagagagatccacaggcccaggctgatctcttccctgctcagaggtctttccagtccagatcgtccaagctgcgtccagtggctcctggaggagtcagtgggtactgtggcctggcgcctggtagctggccgtttggtgccaagtgaccttgtccttgctgtgggcgtggctgccccagcagcctttccaacacggttgggagccgagcctgtggcaaagaggcccatgccccttggttgcctgagggtccgtgctctaccgctctgcccaaatgggtgcagtcagatgaaggagacagaaggccagggccgatgtcaggtggaccagtcctttcttaggtcagcaattaccatgaaatgggtcttctgtgaatcctgactcttcagacccggcagggcatgtcycttccactgctcacagctcttaggaagtcttcgctctcccttccacagatgcacagaaattcaaaacaaagtttgaagaatgcaggaaagagatcgaagagagagaaaagaaaggtgacgtggtgccatgggttggggggcttctttgcagactcactctgcatctgactatacttccaggcgggtgctttttctgtctgccagataaacattccagggtgctgtggccgcctcacgtatccagagtgatgcagctccctggggacacaggtgcttcctggggagccctgagcacttgtcagtgttgctggcctcagtccaattgggcaggcattggagtccgggcactgcctggagctcaccagaaggtgctttatgatggtcctcggtttgtctctcagagggcttggtcacctctgccatgaggctggactgcagctgtggtggcaagtgaccagatgtcactgagcagcctgaccatggtctaggcagtgcttgagtgcatccacctggcttcctttcgtcactgaatttcaagaagacagactccaggaggcggcttggccaggcaggagtctgtcccgagggcgggcaagccgctgtgggtgggtgacggcacttgggaccagcctggcgagggccatgtgcttgaatgcaccgtgcttctgttttctcactgtgctgcttgtgtttttagcaggatcaggcaaaaatgatcatgccgaaaaagtggcggaaaagctagaagctctctcggtgaaggaggagaccaaggaggatgctgaggagaagcaataaatcgtcttattttattttcttttcctctctttcctttcctttttttaaaaaattttaccctgcccctctttttcggtttgtttttattctttcatttttacaagggacgttatataaagaactgaactcaacattcaggttgttttttttttttgtttctaagtttttgccctattgaagatgacttcagaaaatccattccccagtcatgaaaatgtactgtgctaactttcttttccatagtggaaacacttatttatagtcatcaaaaatagtgaataaaaaacacatttggaacctgggccagatggcaggactgtgtgtgtacaggcccctgcgctgtgagcgccgctcgcctaagcctcccgggtgtatgtccaggcctgtccgcagcacaggtgggtgctgcacctcacggtagcctgggttcctgggagagacgccctggtgtctgaggtcgtgcatgtatcttgctgtgggccttgaagctgaggtgtctgagctggcgctggtgagggagcctggccaggggtgtctggtgccgggtgtggtactgatgcacgactgtgggctgggcagcgtgggctctgccgaggcaggctccactgtgccttatggcctgaacagctactgctttttttctatggtgaggaggggtgggctttctgtgttttgaggagagaaaggaagaccactggagtaccttggctttggagcagggaggcagtagccaactgagcagagtctctagcatcggccaaggctgactttggcccctgtggcagagtggcccctgtggagggaaaggccagtctggtgtgctgggggtgggggctcggccctgtagctcttcttttggaaagcctattgtaccctggccttggagaaaactggggtcttggcctcctggacttgaagtccacacttggcagtgttggagttatgggcatctgcagtaactttaaataaggagatattttccagtacgccattgggggttgtcatgtgtaatggattgtctctgcaaataccatcttaagtgtgtggtcccaactgccataacgtgccctgtcaccgtttgtcatgaacacctaccagacgtgcttactgtgaggctggctgcctgctgccatcacttgctctttcgtgccctccacctgggcctgggccctgttctctctgacctccgtgtgctgtgtcctgtctggtgactgcctgctggtttaaacaccagtcctttgtctctctggggcaggggtccccaatccctggcctgccgaccggtacaagtctggcctgttaagaactgggcaacacagcaggaggtgagtggtgggcgagcgagctttaccacctgagcgcctcccctcagataagcagggcattagattcctataggagtgcgaacgctaacgtgaactacgcatgtgaggaatccgtgttgtgcactccttatgagaacctagtgcctgatgatctggggtggacagtttcatcctgaaaccactcccccacccctggtccatggaaaaattgttttccaccaaactgatccttggtgccaaaagggttggggactgctgctctgggggatgtacttccaaagtcaactactctcaggtttgtttatttttacataaatgggaaccactttatggtctctagcatcagccaaggctgactttggtgggtccctgtggcagagtggcccctgcagaggaaaaggccagctcaggagagaaggctgtgccgactcctcatggtttccagtgccctacatgttcagagaaacgtctttggtaatgaactatggaaatggtccctgaaggtatggtctttgctctagaaaaagcccaactgatgactcctcactggcatcttgactgtgttctgtgagctgtggccctcatgctcatggactgcttgcctccagcaggttggcagggggacagtggtgcactttgcacccaagaagaggtgaagcctgtgccctatgccctgtgccgagtgaggtcctcgtgttgggagggtgacgccgtccactgcagatggtgccttgctgtgctgcactcttggtgacacccggggccccaggtcgggtacaggtgtcagttggaggctttgatgtctgtgaaagggagggccccttgcactggctggagcttccaggagagaagcccttggctaggacaggcaccccccagcacagaaaggatgtttagcattctgtatttgatttggggttccaataaaattccaggctgacttccttcatctggggatgggagaaatgtctccaagggagagtccccagcagtgagaaggcccctcggaatggctgggagacagtgccatcctgtggtggggctgtgttgcagggtgcatttgaggatgcagcttgttgacactgcaggatgcgatggtgctgcgggaagggagctgtgctgggagacagaatgcgtccgcgtgctggccccacgggaccacagggtaggctatacaaggacgcccatgtgggcactcgggccagccgtccagcccagtgtgtttccattggcttccctttggcagacaatggtgagcagaatggggtcctgccggtgctggggactgtgtgagaatgcagtgtgcttcagccttccatcccatgtctgtctgccgggctgcaggctggggagcctcctgctttctgcttcattttccttttccctgggatcttagctcttcttgaggaggaaactaggccatgggcttggcagccatgttgggtggggaggccggtgccaacctcgcttggttctctgtctccagtagtgggtctgcactacttgggacccctctgcccaggcctctgtgttaaggaaaagggatcccaaggccagatgcaatggttgacacctgtcaccccagcactttgggaggcaaacgtgggaggatcacttcaggccaggagttcaaggccagcttgggcaacatagtgagagaccctatctctacaaaaaaatataaaaaaaatagcctggcatggtggtgcacgtctgtggtcccagctacttgggaagctgaggcaggaggatcacttgaaccctggaggttgaggcttcagtgagccatgattgcaccactgcactccagcctgggtggcagagtgaaaccctgtgttaaaaactcaagggaaaagggatctcaccaagtaggcctgattccgcttcttcccactgtcagcatttggcagtttactccagggttcagctggtggaggaaggtgacagtcctggcaccctgcacagagcatgggcatggagtcagacctggatcctgaggggctctgtggcatgtgccactagaggaggcacttcatgggggaaggtaggagcaagggcaaggctggagatgggcaccaggtggcaggtgtgttgccaactgagaggctcacttgtggccactgcagagcccaggtaacgagccatctgctccagtggtgtctgctctaggctcaccattgtgccctgagacccctccactgcctcagagctaccatcagtgcttgggagcgctccaggctgcacctcctggagcagggcaccctgagaacagagcttaccactacggctgcctgggagaaagcccatcaccatttctgctgtgcagtagttagttgcattaagggctgggtcccggccccagtcctgggttcctccttccaatagccacaaccctggcctgcccaccctgaggagctgcggccgggtgcttccccaggggagcaggggcctgcaggccaaggagcctcatgcctgtgccgcagggtagggccgctcggggttctggttgcagaggagcagacactcagggctgggggcgatgggtgaggtccccccacagatctccacctagggaggggtctaatgggtctgggcttcagaacaggggacgctcggggcatgttggcgtggccgaggacaatgaccctcactggggacgctccggagcttgactgagggtctcccgctggcaccgcctcctctgccggcgtgtgtgtgtctgggggggggacccacacgaggccccgccccaccccgcccacagcgccgtcggccccggcccggtccaccttaagcggcggcggggcgggtgggatttcctgcgggaggagacgcgccgggcctatcgggcagggccggggcgccgggcttcccaaagggccccgcctcggggaggatgggggctccagccgaccgtctctcaagcctgcagctcgggccaggacgtggagggcccggcgcccgctggccgggctcctccagcccagtggcccgagggagggctgcgaggcggtcagaaggcaaacagccacgacgccgctgcggtgtcacacccgcgccccctcgtgaattccaaggggcttcagaccagaggggtcgttagggaaagggctgcgcccacagacgcccccgaggccacctgcacggctccgcggcccgggaccaggggggcctggccttcgccgtggtgcccaccacccgggccgcaggggtgcgtgggtgcccggcccccgagagccgcgggcgcccgccgggctggggtccccgaggccgcggggtcctgccccctccgaaggtcccgcgaaccggtggcggtccccgggccccatcaactcgccccgcccggtcccgccccgccgcggcccccagcgcccggtccaccttaaggggcgcgctgacataagagcgcagcagccgccgccgcccgtggggtgggatttcctccgccgccgccgccgccgccgccgcgggtcctgcgccgcgtccagcccgcccgcccgaccccggcccgaccccggccggccctgcccgcccggccccggggagggatgcggcggcgcggcgcccaggatgccccgcagccccgggacgcgcctcaaacccgccaagtacatcccggtggccacggccgccgcgctgctggtcggctccagcaccctcttcttcgtgttcacgtgagtcggcgccgcgtctgggggcacgcgggcagcgatgggcagggcccgcacagcccgggcacgggggcagcggtcgcgggggctggcggggccccgggcagtgggcgggcggggcgccggctgcaggcgatggcagtccctctccacccgctggggctgggggagttgaagcggtgtgccggcgtcccgggcaccggggtgagtcccttgtgtggggacaccagtgcgggctgggcacctcgggagtgtccaggcaggccctggcggggagcgctgggccctggcaggggaggaggccgggctgccctgggtgtggctgcagcccttccctccccatgggacccccgaggggacgtgggccacccacaaccatgagtcttctctgcaggtggccgtgggtgcctctcgggtctcctcctggctgcccgccccgggccagagtcaagttgttcccacgtaggtgtggcctggcctcgttgccacgtgcctgccccacagccactggtgacccgggcctggcccttggcctccttctcaggaagacccagtggtcatcacagctggagggcccaggccaggccacacccagggcccgatgttagcacatcacctccgtgggctggccatggtgcacaccaggacccttgaggtcctgtttctgggagtgagagcccgcgcctgcaggacactgggcccctccagcctcaacttcttcacccaagatacaggctggcttaggaccagagaggcatgcggacagcacagcctccctctgtggctgtggggtcaccccagggctccttcaggcacaaggagggttgggggctccaggcttcggttgcacagatcttcaaccacccaccccccttccaccaatctggggttgagacatagcccaggtggcacgaacgatggccacctgttccaaggtggggccacccctgagcatgtgagcctggagaggggcaggtaggggctgcctggcgctcgtcacctttgcaagagtttggggggcccccacgtgcatcgcaaggctgaatcgggtgcccgtggaggcgagagagttacctgcaggctggggctgggtgggcaccgcaggctgccaagagcatgtttaaaaaaggcctgtgtggacgggcttatttctggctcgggcaagccagtgtgttcttgtcacttagttgctgctggtgtggggcagagagaggtgggtggggggcagcctggggagcctggcctggggggacacatcccaccaaggcttctggaggggtgggcccagcccagtgctggtccccagggcctctgtccttgggcggggggtctggcttggttccttactctgtccatgcaattcagtgtcctttctcatgactttaaaagtaatgtgtgggccgggcgcggtggctcatgcctgtaatcccagcactttgggaggccaaggtgggcagatcacctgaggtcaggagtttgagaccagcctggccaacatggcgaaaccccgtctctactaaaagtacaaaa

SEQ ID NO: 93969 - DNA, 59349 bp, Homo sapiens
  misc_feature (1)...(59349): n = A,T,C or G
cctgagaagcccctcatatccctgtgggtgttttcagaagcagcacccttgggtgggcaccggggtgccctccaagttcgccgtctggcgcagaagccgggcacaggatcaagttcccaggacactgcacgtgattccacacactgcaaaacgtaatcagaatgacagcccacaagtgaagaccaaggaagcacaagaggctgggcagcccaggaagagctgacagctggtcaccttagctcagggaagggctatggccaccacacatcacagcaggcaggggcttggtctgaggggcctgcagtctgaggacatgcaagtaacacaaagctgtgtaggggtcaaagggggtgggggcaccagggcaccctaccctggaccrccagagcactaggatcctgtgggaacagaggctctgctgtgtccatctaacaacatggtcaccctctccagctgctcccagcccacccaacacagacgcaggacacagacacagggacactcctaagagagtggcccaggagtagtagaggcactgggagcaggccctggctctgaatgaccttgggaacacgatctgccaccttagcctgagttttccttgtatgagcaggactggatcaatgaatgcttgccccaaaaggctgcccagaggcaaatgagctagcgtgagaaagccttccaaagagctactcagctacccccttatagctgccgtcacatctgcctcatggaagagggcactgtgcccagagtggcagcaaaacagtggtcagcaggtctagagccacacgacagtgcaaacaggcctggccagggcagggcatgtgacattcctgaagaggaagggggcctgaggcccagggacttgtccaagggcagacggttcactctaaagcttgtggtccagcaggaagccaagggagcacaggagaggtgctaggggcagggaaggtgggggtctcagcaaacagccctctgtgcccacttcctagaggaaaacgggcaaagcccaggctgctacaaagcccagcggtggggcaaggactgccctgagtgcagccctgccagcccctacctctgacgctctggagttgggggtgggggatctaactacccaaacctccccaggaaggccgcatccaggcgcagggatgacccagcacttactatctactcacacccacattagctgtcaccctgctggcccgcagcaggccgcgggtagggggcagagtgaccgggcgccagagctgtccctgatgctggccaaggccgagcagcccacacaccctgcagggaccacgcagctcccaaccctgccgatctcagcctccccgcagcgagtctggtcccacctgccagagtccctcgcatcccgtgccagcggggattatcaaaaacaccttccagtaacgcgcggggcattttcgtcggccgggatcgacgtggttgcccctgacccagccgcctgattctataccatacctcagaaaggggaaactgaggcagggtgaggaagtgcggccagcccacccaccttcaagcagcctggcccggtccgcgcacccagagcccagagcccggagcccccgagcccaggccggccgggccactagcggagtcggccagccccggagccgcgcactcaccgcctccgccaccgccgccgacttccgggtgccgcgcccgcgcgccaccgcagccagcccagtaccgcccagcccgaagccggcgcgttcaccattgggccgcgcagcgaggggcggggcggcgcgccgcatgcmggygtcccgttggctgggcgcgctgtcgctcggaggctgccacctcctggcgccccgcccccggggctgcgccaaagcttcgggctgcgcgggcgtctgagcgcttcctgatccagcggccttcggggactccgcggctccctgcctgcagggacgccatgggaggtcgcagccgcccctgagtccatgccctcatggacaccatctgtcacctgctcaccctgcggcctctctcggaagaggtacaggaatgctcacttccggactggccccctcagactgcgtcctggtctccccatcctgttcactcaaccccacctctggacctggccatcttcctcttggtcatcccttccttcactttatggcctccaggtcggctctttcctccctgatgtccctgccattcccagtatgtacccccagaccctggactaggcatttgagcactataccctgcacacccaccacctcccccacttccaccccccagtgtagcctttgagctcacatccaggtccaggccccagcgacgaggggctggcccagcttgacttgtgcagggtgagcaggtgggcactgactggggccctcccaacaggacagaggcattagctgggaccgctgctcctgtagcctctgggctgtgcctgggcctatgtggcagaaaggtggagagtcaaagcccagaggctcaggccctgcctcaaagtgagcattcaaaaaactatgacatggatgacaaagacattagggataatgataatgtgtaaagcactctaaacccaatgtctgggtcagcagttctttcatcccactttatagatgtaaacactgagacttggagcagttatgtcattcagttgaagttgaaaaaggtggcaagcaagagaggccacattagcttcaacctgtgttgaagacctaggtgccctgatgccctgcagaaaactggggctcagggatgggaagagcctggctggtaatcagcaacggcaagagtctaacctggacctacatgcgggcccgttgtgctccacacttttgctatcttatctgtgtttcccctggaacccaacagaaccttttacaaggactccagatgcccagggactcatggccagcgggccgcagacccagccagacatggttgtctctcccaccatccagcagtgggatcatgtggggctggtaccagtgatttccctctgagcagccaaacctatgcaatctatagggccaagaggtggtggtggtggacaagtgggatctggggcttgggggtgatggactgtgccctggggttcatggcagcacctggagaatgggcttccccaaagcaccaggccatgcacctcaaagctggacatgagttgaccaaggtttccctttgcccacaaagagggatgcagtaacatgtcagatggtggtttgcatcctgttctgtcataccttgtggccttgggccatccccacccccagccatacttttcccagctagacagagccagagcagacactctgatcttctttgtcaccactgacactccagtctggatgacatgcgatgccaggaagcaggtgacggcagatgaaatgggtctaggatgggcacctaagccctgggatcttggggctgcaacaggctcactggcatccaacctctaattgcacacaaactcagataggaagctcactaccttctgtggccactcttttgatttcaacagctgccactcttgaaaagttcttgacacccagctgaaagcattttctctctgtggctttctccgggggcctcacagctgtccgcatggagctaggtgagaggatgagagagggagaacactgggctactggtccctgtggtctcccttgctgtgtttttcttatctttttcttttttccttttttttgagatggagtctcgctctgtctcctaggctgctgtgcggtggtgcaatctcagctcactgcaacctccgcctcccaggttcaagcgatctcctgcctcagcctcccaagtagctgggactatgggcgtctaccaccatgccccgctacttttttttgtattcttttagtagagatggggttttgctatgttggccaggctggtctcgaactcctgacctctggtgatttgcctgccttggcctcccaaagtgctgggattacaggcatgagccactgcgcccagcctcccttgttgtgtttctgacccctggctgcagcctaatgggccgactgctggacagcggtcctgagtcctgtttgaattggtgctgccccgacatcctctgacctcagctaatgatcctgcctgccgagggcagacaggtctctgcaaccctatgggtggtaggggtggtgatgaggggagaggtagtctcacttgcacagattttggtgtatggttctgtcttttgcactctttcaacagaggtctgtccagtccctcttgcaagtgtggggagggggtggtgcaggactatgaggtaactgtgagaagaggggctccagcagaaccagggtccaatggccttgaagagatggctggggacagctggactcattacgtctactcctaaatggaggaaacgacccctcagctacacagcacctgagccagaatgtcaccatggtgctgctccacaggatgacagctacctggtttgtgagggcccctattctagggacagctacttcattctgccctcccagagcagcaagcaacaaccctatgccaggaggccaattggcacgtcaagtgccagctccaatcgattgatagtagctgcctggctctgaaaggcagctgggatcgattcaccatgctgccagcacacagatggacccagcggtggtcccagcagtgagttcttgccttgggccatttcattttctttgtcctggccaaggaatgattggatgaacacactggactcccaatatgggtggataagacaagagtgtctggtcacacccctccaccactcataagcatggttgtgggcagtttggttccccaggcggccttggagaatgcaatgagccgaggaactggtcatctccaggtgcatccagggcaggaaaggatgacagcatgcgtgagccagggtcactggctaagaagtcatctcaggacctccccctagaaaagcccactgggcagcatccctgctggttcccccctacaccacaaggttacgcagagctggcggagggtcatggtcccactcatgtcaggtgctcttaatctggaaaggaaatgtaacctacgtgaatctcaacaggcagtgaagcaccgtttcttcctgactccaggtagggtgaagaaaatgggacagtagtacggggtgcgggcataaacgcacaactctgcctccccagacgcagagctgtggggctgtgagaatgccaggaggaggtaagaaagggcggccccatggggggcctgcagggtgggacaagcccaagaggtctctacatccaggcctggtgggggaggtgagcccctggtttaccgagggggtcccttcctgccctcggaaatactgcagctcctacctccatcgtctccccgctgcggggacccaggggcgtgaggatgagagagcccccaggccccagggtcagacgactgtgttcaagcaagtgagaacctctctgaggctgtttcccaactgtaaaatggggatagcagcagaactctctctcgcggcttgcgtgaagaatacaattcgatgtcgacaggagggagcggcgcgcagcgcgcagcgagtagcaggcgctgaagaaggatacctgtgaactggaagtggtggcggaggctacgcggccagagtccggggaaggggcgccggctctgccagtccctgctcggggctggatggtcgggggatgttctcgtaagtcggctgggagggagcggtcccgcgtaccctgccaccgccgccgcagaggttcgggcaggtgcggggccgcggcccctccgcgagggggccggtcatccgccgggactgacatcccggaggcccaatggcaagccgtcatctccgcgcatccgcccaatcggcgccggttgccgtgccgcgccgggtctctcgaccaatgggaaaatttgctgtcagatggggcggggcggagattcgcgtcgccggcccggtccgctttgcgcacgggccgcgtgagggcgggagggctggcccggggtctcgggttgcgcgctgggcctggagggagggggcggcccccgcaccggtccgagttgcggccgcgtggactgcgacccgcgccgcgccgcaccgcgccgcgccctgggaacgccgctccccgcgcgccaacggacccggggaagcccttctggggtccgaggccgcgctgcggggccgcccacgctgcgctccaggtaagcctgagccagtgggcggggtgtgggacccggggctggggcctcgggtcggagccgggactgggggcggggctgcagatatgggacgcattccgggcagcggtccggacagggtcctatccctggagtcgagatccgggcgagggtctgggccggacgtcggagccaatctccgccccacccgcgtcttgtccgcgcgctctgcggcgtccgagaccccgggccggcgggggcgggtctctttgtgcgtggccttggggccctaccctacccgtccgggcgtcttgcactgagcactccagccgagcgcggcccgaccccgyagccgtgcccgccccgcgcgacgcttggcgcctagctgccagggccctgcagccrccgaaactttccaacagcccgaggggcggcaggccgggaactttcctggggcagcgcgccgccgggaagctcaggggcaccgacggcccggaggtgtcctcgcgccgcgctgctcctgccgcctcgggggtgagagagggcgcgccacccggacccccggcctgggtccccctccccacgccgccctgcgccccctcggtgccggtgcggagacatgtcatctccactctgagggagactctgctcggtttgctggggagtcgccctgggcaggtggcctgagagctccagcctattttaatttttaaataattaaatattggctgcttacaatatttcaccgtttcttagctatgtgtaatgtaacatacttaaaatggaactaaaggacttcagctycctttccctacatccaggcatatttagaaataaggaaaagaaaggtgccccgtgggtattttttagastaggctcttaatgctgctgtctaataacctcaggtgagtacccaggctgctgtgggggaaacctcccctatggtatgggccaggggggtgcagtgggagcctccacctctcccgaccttagcttctctggggtagctgcctttacttcttcctacttcttaactactgccttatctgcctttactctgggatctgggcggtgtttagaggtctggtccaaacaaggcaggtgttacctatcttgtactcactctattggagctgggatggtgctgaatgcaggggggcagtcagcgctctcttgcccggtgtgccatgccagtggccggtcagctcctaagcaggtgatccaggccttagatcaggcgacagtgtgagccgcagcgtgtctgggaaggcatttcccccagtcttgccmcatcctatccgcaatgtctgctcccagctgtcccctgtccccaccctacccccattctggggtccaccagcgcccagcagaggactgggcacagaacattcgctaagggactcaagtcccagctgagagggtagttgagcacagccaagccagcccctgcccagctcttggctgagctgccctgtcaggcttttcagcataaacacaaggaccttctgaccaaggttcctcctgggagaacaagttctgaccctcaatcctgctaaatttgagtctccccacccaccacatctgggctgcttggctcccatgtttgctctggcactccctccagaggtggccctgtagtctccccccagtcccggggccctctgcatctctgtggctctgtgagggtagggtagcacccctccttctgtttgtgctacacagggattcagggtgagttccctgtgctccttcaccccaggagtctggcctgggggagcatgaggctgtcctgagtaaggacagaaggtgcaggagcagcaggatccccggtctctgggtggagcagggagctctgcacacggatgccaggcaccaccctctgtccagcccatctgtcgtgctccccgcctggccctggcagagggagtgacagggtagagctgggatagggagtcagggcccattctgtagacagggccaggaatggagggtgggggtccagggacagcactgcagagcaccagctgggccttgggggtcctggggacttccctgatggtggcttagtcatggggaggtgtctgttcttttgtcagcagcttcaattaagaccagaatgaggccgggcgcagtggctcatgcctgtaatcccaacactttgggaggccaaggcaggtggatcacctgaggtcaggagtttgacactagcctggccaacatggtgaaaccctgtctctactaaaaatacaaaaattagtcgggcatggtggcatgcgcctgtagtcccagctactcaagaggctgaggcaggagaatcgcttgaaccggggaggtgagggttgcagtgagccaagatcacaccactgcactccagcctgggtgatagagcgagactctatctccaaaaaacaaaaacaaacaaaacaaccaggatgggctggtcacggtggctcgtacctgtaatcccagcactttgggaggccgaggcaggcagacagatcacctgaggtcaggagtttgagaccagcctggccaacatggtgaaaccctgtttctactaaaaatacaaaacaaattagctggacctggtggcatatgcctgtaatcccagctgctggggagactgaggcaggagggttgcctgaacctgggaggcagaggttgcagtgagccaagattgtgccatcgcactccagcctgggtgacagggtgagactccgtctcaaaaaaagaaaaaaaaatacccacaaaaaaacaaacagaaaaacccaagatgaagtcttgggtcactctgaggggacttgggatcagggatcccttagtaggttttcctggctcagggccttcatatcttggcctgtttcaggtcgggaagatgacccagagctggtgggtgcctggggccacagagttccccccactccataaccagttatgcacaggcccttcccactgcccctgctgattgaggggctgccgcctctggcagagcaacggggagctgagcatggccaccagagggcagctgggaccgccacagcaggcaagaccggctccacccagcttcctgcggcagaccaggacccttccccagacacctggcttggatgaccggagctcggcctccaagcygcctattgagggcgtggagttggaaaggagccaagcaaggcccctcggtacccccmacatgcttggtgcaggcagaaggaagcctgaaggccagctggtgggtgaccacacacaggctcagcagggacagtgaaggactagccctgtgcctgcgtagccccaaaagtgcagtgtccttcaagtgtgtgcccaggggcctcccaagccttcccaggtgtggtctgtgcctcaatgtccacagcagaagtgggcgtgttctcactatgtgcccagggtggcagcaggcctaggagaacactcggttttgctgtagtggacagcattgtcattgagcagcatggaccttccctgtccactggccacggggcactccattcacctgcctgcattggctgttgccagggcatgttctcagctacctacagtcagtgtcacctcgcgctcatagagcaggaagcgaggagacttggggagggggtggcctgctgaggccacactgcagggagtgcagagcgagctcacctgggcccctcattgcctacccagcccaggctgcatcctccatcccagttctgggcccagtgtgtacccatgggagctgccctgtgccgtcagctatccaaaggactgtagcttgccaatctggctgtgtggcctgggccaggcttatgccccagtgtgagacctctcagccctctggttggaccatggataccgtgccagaaccacagggcttactagggcatcagtggggtgtagccaggggctgacagagccccatggccagccatcgggtctggacagtttggtggggagacccagtgtgggggtcccatggcatgggtaggcccaggccatcctcactgggaaaagggcccaataaagggcgtggtcattcccccgctttgaggcggctggtactgggtccttggccaggcaggtgaccccagagcttgcagagcactcaggggggctccccaaggtgagcacctccccaccttcccatatgatcctatcactagttctgccttcacatcactgtcctgtctgtcgtccctctgtccgtccactgcccagagctcccttaggttgtccacagatgctctgctctgcccctgcctgtacgatgctgatgtgcctagtgcacccttaggaaggatacccacagctctggctgctcctaccactcagcctcctgtggtgctgctatcctctgctcccacccatctcctgggggaagccctcyccaatgcctcacttggaccccttcccagggtctgctattggctctaccatatggttgcaggttcttggcctggctggaccccatgaggtaggaggcccatgaggaaggacccatgttctcctttggtcacacttccccaactgggtggggggggggggactttgggaggcctggaggcaggaagacctgagttaaatcctggcccagcccttgtctggctgggacccagtttctccatgtgtaaaatggggtatatagccaacctgagrcacctrgtagagtcagtgagatgacggctcacagccagtgtgtctcggttctgtggcacatggtgactccgggggagaggctggtgcttatcagggataaaaaaaaaaagtcacatggttctctgtggtacaaaacctatgtgaacacttaagctaaaaccagaggtttcctagaaatgtcacactcagagcaaaagctggttcctaagcctcagaccttggagtaggagcagcatctcctcttcctcggggcgcagtgctggtggatgggctcccaaccgggcctgcccatctcaggtgcacacacacactcatattcacatgcacrcacatgcatatgcacatgtgcctggcttggtccccagttcttccctgcctcaggccctgcatcccaccccccatgatcccaccctgaggcrtagccagtcgcccaccctcacttggaccccttcccatgatgaagaggctgtcgtgagacggggaaacacaccgttggggcaccagaatggaccatgaccacaaaggactattgggcggggcctcagaacaatctagaaaacaccgtagaggcgggggagagagctctcattaccgatgtcccccagagacagcctcccatccgaggcccagcccttccctgtctgtctgcagtgtcctgtttttcatttttatgacatgaacactctggcaatatccccgggcctagatataaggagagggaatgtgtccccggggccattagctgagacaggaagccgcagggtcctcccctgaggaaggctgaaagctgtgtgagtacaggcacccccttgtctcctgctccagcccataagcctsagctccccaggcttgagtgccaggtcccccatcccasacaaatggttattcacacctggccacagctccagggccaggaacctgcctgcttccccgccctccctgtactggagactgttgggggcagctgcctgcctgggagggcccaggatctatgttggcctcagggaacctcaggagaggcacgtggcctcgcccacaaggcgggagcggactctagggaggtggagcagatgtcttatggggctgtgagcacctgcgtggggcarcaggaccctgagcctggctaccctggggtgggaatactgctgtgctgtgtgtgatggggaagacgtcattatcagtccacatctctgaaggatcacgtttctgaaggatggtcaacagcattagacatgctgacaaggaaccgtggcagcccagtgtcacctacagtcctggacatgtgggrgcaagaaggtacacatgagtgtgtggttatgagtcaggagcaccacgggatgaccttcagatcaggcatgacaaggtcctgcttagaggacggtctgggcttgtgtacctttatccggcagggacctacccagctggattgacctcactcatgccctctggtttccctgcaggagccagagcctgcagggtgggtgtcgggacatgctgatcttccctcaagacaggtgagtggcctgggtttagcttggggacatcctctcccacataggacagcagagtgttctggtgggcctggcgggtgggggtgacagggatggactggccctggacactgtgtgctcctggtccttctcaccctgggtaggcacagcccctgggctggacagggtggatgtgagggcctcctgccaccagcttgggtttgttactggcctgaatatgggcagcagccactggtttgatgtctggctttagggacaagcctgtttggggctggctgacgaggttgctggtcagtgttggtttggacattcactgggtctgctcttcacctgcctgagctaggatgccagccgcagtggcatccagtattggcacagcctgctgggccaggccattcgcttgccccccagagactggagccacagggacagaggatagtcctggaggccaggcacacaaaactttgtttgaaaaggtctgatagtaagtaattcaattttgcaggccttatggtctctgtcacagctgcagttctctgccattgtaggatgaaaatggctgcagacagcccataactgaatagtctgaatgtactctgatcacagccgtaggccatgtgtactggcccgtggcctcaggtgttatctgtgtttggggttcctctgcttatcatggctgctagctccagtgggactgaggcatagcgcctgggaagcatggcagggttggaggctgagtggtccatgtcccccaggaccctctgaaggatggtaaggcataccctgctcacatccacgctgccagagttttgccacgatgggtgctgttcagcagagtgggtgatggcttaagagaatggctcctggccattcttgttcctccagtccccaccctggccatctgcctgtccccccaaaaagcagtctctgtgggaggcatggctgacagccctgtggtttctcagtgacaattagtgcccattgtggaggcatggcccagccagtgctgtgcctaagtggtagggagaaggccatggcctccggatgcctgagtgacctaggctgagggatctagggcagatgggagggacaggatgactgastccttgcctgttcccaagtccttgggcatggaaagctgccggccgggcyagcctagtgggagctgggtctgctgccgcctggctgtgtgggaggaccagcgtctggccgagaatgtcactgctcaggccatttggccatgcagggtcttctgggttgggacaaagaagctcaggcagggtacttggcttgcttgtggcacaggtgacagggcatctcagggtggcaggaggggctgtcccactgcccttaactcctcgtaggtcaccacacttcagggaggccaggtcagccagacaccaaacgacarccctggtaacagggtccgcaggagggtggttggctgggcaggtccgaggctgcccaggcacacttgctcactctccctcctgttgcttgctcctttcttgtcccttcttttccctcccccctccagttcttggtcttctctatgtttctctgtggccctctctgtgcctctttctctgcctttccccatctcctatcctgcccatctggaatgtggtgattgcttattcctgtctgctgtggtgattggtttttcatgtctgccctgggcactggtgcgatgggtgatggcatttgtgccatctctgctctggcytgggcaacctgggcyctggcttgcggctgcctgctctgctgggccctggggtgtggtcctgtccacagcgggaggcagctggggagggagcctcagggctcagctgggacaggggctgatgtaaacacccatgtgtcaccacactcagcacccactcacccagcctcatgctgggtcctgggcatcacaggcacatcaggcccagccctgcccctgaggagctcccagcctggttgaggagatccacaacacacagaggaaccagtggccaactgtggggttacaagatggtgatgagtagcatggctcccttaggagggggagctgggagggtgtgatggggtggtgcgtgctgagaccaggcctgagtgagaagggctggcggggacacagatgccctgccgtttcccatagctggscagcagtggtgtcctctcagagaccagcaccagcctggcctcctccatcagccgccgtgtgcctgcagggggttgcggcttcgtctcctgcggccgcctggcccctatgacaggccttctcttgggttttgatgtgtttctcagccattgtatgagtctttgtatattaaagatattaattcttcactcctctttctgcctactgcacatttttctcacccttttagtttttgtttatgatcattttgatgtcaaaaatgtttcatattttgtggtgaagtgtgttggatttttccccatttttagatattccgtctctctgtgtagtcaactctccctagcatgcagccagataaagatgcacctgtcttttcttctagaaggtatttttactttagttttgtacacagcatttaatctgtctgtcttagtccattttgggctgctgtatcagaatacctgagactggctaattcctgaaaaacaaagacttatttctaacaattttggagatggggaagtccaggattgaggggccacatctggcgagggccttctttgtcgctacatcccccaggaggtggcagaagggcaggagcacacgtgagagagcgctgaaggaggcggaacccatccttttatcagtaacctgctcccgagataacaaatccactcccactgtaacggaattaatccattcatgtagcagagcccttgtgacctaaacacctcttagaggtcctaccttcaacactgttgcgttgggaattaagtttccaacacgtgaactttgggggacacgttcagccyatagcacaaactagtatttattctgatgtaaatggacggcaaggatttaactttgtttttacagctgcatctgaactgtttcctttttgtttgtttgttttgagacggagtctcgctctgtcacccagactggggtgcagtggcgcattcttggctcactgcaaccttcacctcccacgttcaagcaattctcctgcctcaacctcccgagtagctgggattacaggtgcctgccaccatcaccagctaatttttaaatttttttttttaatagagatgggatttcaccatgtccaggctggtgtcgaactcctgacctcaggtgatcctcccgcctcggcctcccaaagtgctgggattacaggtgtgagccaccgctcccggccatgcctggctaatttttgtattttttgtacagacagggttgtgccatgttgcccaggttggtctcgaacttctgggccccagcaatccacttgccttggcctcccaaagtgctgggattacaggtgtgagccactgcacccagccttaaatttttacctttgatatactatttatttcaaaagggtaggccaggcgcggtggctcatgcttgtaatcccagcactttgggaggctgaggcaggcagatcacgaggtcaagagatcaagaccatcctggtcaacatggtgaaaccccgtctctactaaaaatacaaaaattagctaggcatggtggcacgcgcctgtagtcccagctactcgggaggctgaggcaggagaatcacttgaacccaggaggcggaagttgcagtgagccgagatcgcgccactgcactctagcctggcgacagggcaagactccgtctcaaaaaataaataaataaaagggtattatgcaatttcttacttattatgtgagggagcctcttttttttttttgagacagagtcacgctctaccgcccaggctggagtgcagtggcgcgatctcggctcactgcaagctccgcctcctgggttcacaccattctcctgcctcagcctcccaagtagctggaactacaggcgctcaccgccacacccggctaattttttttgtacttttagtagagacggggtttcaccatgttagccaggatggtctcgatctcctgacctcgtgatccgcccgccttggcctcccaaagtgctgagattacaggcgtgagccaccacgcctggccagggagcctcttttttaattttaatttttaattatggtagaatacacataacaaaatttactatcttaaccattttcaagtgtacaattcagtagtgttgtttgttcacattgctgtgcaaccaatttcagaacttttttttattcttgcaaaatagaaactctgtacccattagaaaactccccgtttgcccctttcttgaagtgcttctacttttcctattgtttgactactttagatgccttacataaatagaatctcacagtatctgtctttttgtgactggcttatttcacttagtatcatgagaatatcatatgtcagaatttgatgcctgatattccattgtatatctataccacattttgtttatccatttttccactggtggacacttgggttgcttcccctttttggctattgtgaataatgctgctgtgaatatgattgtgcacatatctcttggagactctgctttcaattctttttttttttttttttagacggagtctcgctctgycgcccaggctggagtgcagtggcacgatcttggctcactgcaagctccgcctcccaagttcacaagtagctgggactacaggcgcctgtcaccacgcccggctaatttttttgtgtttttagtagagacggggtttcaccgtgctagccaggatggtctcgatctcctgaccttgtgatccacccgcctcggcctcccaaagtgttgggattacaggcgtgagccaccacgcctggcctcaattcttttagatacataatgcagaattttctgattgctggaccatatggtaattctatttttaattttttgaggaattgccatactgatcttacattcccaccagcagtgcacaagggtcttaatttgtctgtatctctgccaaaactttttttttttttttagactagccatcctaataggtgtaaggtgatatttcattgcagccttgatttgctcttccctaatgatagaaatgttgagcaaattttttaacgtgcttgttggccgtttatatatcttctttggagaaatgtcagttcaactccactcatttttaaattgggttatttgtgtttttttgctgttgttaagttttgggagttctttacatattctggatatgaattccttttcagatatatgatttacaaatcttttctcccattctgttggttgctttttcactatattgattgtgtcctttgatgaacatacattttaaatttggatgtagtacaatttatttttccttctgttgcctgtgtttttggtatcttatctaagatatcattgccaaatccagtgtcatgaagactttcccctatattttcttctaagagttttatagtttgaggtcttatgtttagatctttcatctattttgagttaatttttgtgtatgtaataaggtaagggtgtgagttcattcatttacgtgtgtgtatccagttccatcatttgttgaaaataccatcatttccctaatgaatggtcttggcacctttattgaaggtcatttgaccgtattcatgagggtttgtttctgggctctgtattctattccattggtctttgtgtctgtccttatgctaataccacactgttttgattactgtagctttgtagtaagttttgaaatcaggaagtgtgagtccttaaatgttgttctttttccagattgttttggctctttgggctccttaaagatcgatataaatcttatgatagatttctctgtttctgcaaacaatgtcattgggattttttttttcttttcttttytttttttgacaggtcttgttctgtcatctaggctggaatgcaatggtgtgatcctagcttactgcggccttgaacccctgggttcaagcagttctttagcctcagcctctgactagctaggattacagatacatgctactatgcctggctgtcattgggattttaataggaattgcactgaatctgtagatccctttcagtagtatcgtcattgtgacagtggtaaatcttcccagccatgaacatgggatatctttccactgatttaggtctttttaaatttttcttggtaatgttttatagttttcagtgtacagatcttaagtttcttaagtttagtattatgtattctattctttttaatggtattgtaaatggaatagtttttttaaatttccctttcaggttgttcattgttcatatatagaaatgcaactgatttctgggtattcattttttatcctgcacctttgctgatttcattttttacatctaatagagtttttaaaaaatgcatgtagaatctttacggttttatataaggttatgtcgtctatgaacagagatggtttttctttctttctaatttggatgtcttttatttctttttcttgcctaattactctgtctaaaacttctagtactatgttgaatggaagtggtcaaaacagccatctttgtcttgtttatgatcttaggagaaaagctttcagtctttcaccattgagtatgatgttatgggcttttcacatatagctttcatcatgttgagaaagtttccttcttttcctagtttgagtgtttttatcatgacagactattgaattttgttaaatgtttttcctgcatcatttgacatgattgtgatttttgtcctttattctattactgtggcgtattacattgattgatttttgtacatggaaccatccttgcattccaggagtaaaatcccacttggttaggtttataattcttgtaaaatgcagctgaatttggtttgctagtgtttttttgtttgtttgtttgttttgagaatttttgtttcagtattcataagggttattggcctgtggttttcttttcttgtagtgtcttttcctggctttggtattagggtaaggctgacctcataaaatgaattaggaagtgttccttcctctttatttttgggaaaagtttgaggacgattggtgttaaaattacttgaatgtttggtagaatacaccagtgaaaccatctttgctggaggtttttgattactgattcagttttgttgctagttgtaaatctaatcaatgttttctatttcttcatgattcagtcttggtaggttgtgtgtttctaggaaatttttccatttcatctgggttatctaatttgttggtgtataattctttatggtagtctgttaccatctttttattttaatgttatacaaagaaaaggaaaacaaattgaggtttttttttgttctgttttattgtttgattgttgtttggcttggttagattttgttttgtggttcttggatttgtacctaatctgttggagtcatcagtccacaaacccatgaatttcctgagccagtaaaaatgcttccaatgggcagctgacagaggactgctacagacaactggagctgccttaatgcattcagaatcgcaggcccttgctgaaaaaatcaattccacacatcagcagctgctattcccttgacacaatcttcatgcgcaggctgtgggcttctcacaaacttgtggtggtggcagcccccaaatttgaatcccagcagtgcaagcacaggatcccttgggttatccaggcctcatttactcctgaattcttctcttcttttggttcttaaaactacttctctgggtagtccagggctctaggtaagatgagtttgctgcctctgaaaatccagaaacctcaccataatttttccttatggggtttcagagcgatgttaactttgtaaaagatctcaagtagagaggagaggcgtttgtttgttttaacaaagctgtcagctcttttttatcataaaacagcttctgagctgtgagagacgggagccaggcagcaggcagcagcgtgttgaggctgacatttacagagrgacagtatgcagcccctgcaggcctgcagacggcctggtatagagagaggcccaggcttcagcacagcccgcaggtcagagctgggcaccctcctccctacacctcgaagtggacacagcgcatttaggagccagaggaaatgagactgaattgtaaaagccagaggtagacacatccgtgacttcctgggcttcttttctggacagaaggctcacaccctaactcagattccagccctgacgctgayagccccgttggacgtactcctgttgaggtsgtttctggccgtttttctgtggttggaagagcactgtctgtcgttctcgctctggaaactcctatcatgtggaagtttggccctgggctctgtcttctgtggctcctaccatcctcttgtcatctctcctgtttgctgttggggttgggaggaccgtcttagtgtactttctccagcctcacactgcgtgttttctacagtctgctgtttactgcctctgctgggatttcctttaaatctccatgggatcctcattatttatagcggctccttttctttctttcttttctttttttgagatgaagttttgcttttgttgcccaggctggagtacagtgaggtgatcctggctcaccacaacctctgcctcctgcctcagcctcagtcctgagtagctgggattacaggcatgcaccaccacacccagctaattttgtttgtatctttagtagagatggggtttctccatgttggtcaggcaggtctcgaactcccaacctcaggtgatcctcccaccttggccttccaaagtgctgggattataggtatgagccatcgtgcccagccagcagctccttttcattgtggtctgtggccagcggagttgaacaccgtctttaaccttctagggcacataccagctgtttcctaagaaatgcgctaaatgtgactcagcgggaagcggcttcctgagtcctcccatggtggaagggtcttccctgggcactaggctgctgtaagttgtgcttgtccctgcaggtgggtctgtgcaagctcggggtctgcaggcccagccactcccacctgtctcagaggaacctcatgtgggatcagaggcagggggtcctgcagatcttggtgtcaggggcaggcttgacccggcctcaggggtctcagagggggtctgccttgcccggtgtccaagacaggaatggrgtctgcctagcatgctgatcttcaccaggagccaagatgtcccccaccccccaaagggcctgtcgggacttctaggtgggataagcagcagccatatgggtgtggacgagtgtgcctgctggtgcgtgtgcctgtggggcagctgtgggtccctgtgcstgggtgtgcttgtgtgtgtgtctgtgtgtgtcttagttcattcacgctctgccaccaaataccttagatggagtcctttataaacaacagaaacatactgttcacagtgctggaggctgggaagtccaagatcgaggcgccagcagattccgtgtctggtgagggctattgatagatggcgctgtgtgtcctctcatggtggaaggggtaaaccagccctcaagagccgctttgataaggacactgatcatataagggcactaatcacctcytaaaggccctacctcttaatactgtcacattggagattaggttttaatgtgaatttggggaacactagcattcacacygtagcagtgtgggtggctgcacacatgtgccagtaggtgcctttgaggagggccccaaactgtcagcacttctcccacctctttgtagtggggactggacacacagtcaagtcccgaggctctcctggtatgtggcggtgggagccagatgggaggctgcagggcctggaatctgccctggatggggtggtgcagccccctgcctggccctctgtgttgcttgcatatgaaaggcaggactttgtgcacttgctggaggttggtgtctaggcctgttgccatgggcactccggagtggagctggctcccagcagaggagggggttgggagcggcaaggccagcatccagctcaggctctggaagggatgagcggtgccccaggcaccctgggagcagccagckctggccagaggccacacaggaccctggggcaagggcagaccaaaggggacatggaacctccctgcatatgacagggtgggctctacttcatgctgggtcaagatctcacaccactggctcctctgatgtgctgggtgggagaagggtacagtgaggagcacctttcccaagggttttgggactttcaggggacaggctgttgtccccaagggctggcagcactgcctccttcctgaggctcacctctcagtgctgggtcctcgttctgccccttccagtgcagggaagatgatggctgggaaagtgactttgtccccttgttctagaaggtcaggggagggtcctttggaggaggcastggggcttgcacctgtcttatctctcggcttcacaggctgaaggtgccggtggttctgtctccagcctgaacccctttcttccagaacttcatgcatctagtggtccctcagcctctccagcctcagagactccctttgcaccctcccactcagggtcccggcccctccctccagccacccaggcctgatcccttgcggtcagmccagacttaattctcccacccacaccatcctctgatccattctgaaccatatggcctacgtccaccacagcaaccaccctatggccactccctgccacggcagctggagggtcccaacccccacccctgtgcctgcaggtgtcagcagagagtggggtgccagtggggaaggcaggttgggaggggtgtggtgagggcctccattgggggtgcagcaagtgcttgctgacccaggcactgccctgtgggggcagcccttggccccactccctagtagtcaggtagatttgcctacaaaaggatggatctctccctgggccagtgcctcctcgtgctgccgcagggggccagtgatccccaccccaaccccaccccaggggcttagttagcaaagctgctgtgggtcagagtgaggtcaactcgggagggcctctaggcagggcgcccacatgcagggagctgccaggtgcctggtcagcagcagtcagtgggtgggggcagggactctcaggccagtacaggaggggctccagggctgggagtctggggaaatgtggcctggcctcctctgcctccctggctgtggggctgtagcatggatgggacagccatgctgtcactgtgccagggacccacatcatcctcagggttccatttccccagccctggaataagccaagccatggtgaggttccgttttatccaactctggcctgtcccagagttgtggctgcagcaaggccagtgacatttccccctgggcggataggtgaagacggaggctgaggcttgagaagtgagaggacagtaaactgagtggggcccagatgccagggccagtcctctcggcacacctggtgccagacctcccactgtctgacctgccgtctcacggcccctgcctgccctcccacggaggacttcctgtccccatctcccaccaggcactgttcctgcagccatcctgggcatttcctgactggcgggagctcccctgccagtgctgttttccacttatctaagcagagtgtgttctttgtcaaaacaacagagrggaaagcaggaaccccccagctcctgcagagaggcttctcggtgctgtctctgcccagcctcagcctggcctcctgggctgtccggctcatccatccggagacccttctgggtgggcagctggggcgggctggcctaacctgaaggctctcctacctcagcttccttggctccgaaacctgggaggggggctgggccggcgggccctgctttaccccccaggggccctttggccacaggctcccaggggctgcaccccacctcccctcaaaggggctttgtgtcaccacaaagaggctctgtccctcaggagaagcctgggtgtttccatggtgatagaggggctgggaagaaggggtctaaccccgtcttccaatgaggggggaaagggcgttgcaggcggacggccctgtgcactcaggctggtggccagcgtggtgactgctgcacctgcccgctgaggcccctcagcctggtggacagctgtctcctacagtgcctcagtggggccgtagggcatggtagggcagggctcccaggccctgtggctgtctgcctctgatcccagcctagctgtgaaccctgtcagttcgctcctcagggatgctttggtccctgtgcccaccccagagtacagaggayggggctcagctccatgtctgggccttttacaccccgcctccgcctccactgcgcctgccctccctaaggcagggcatgggccacacggcaccttgcggggtgggtgcccgtcccggtaagccgtggaggcaatgggccagccaccgccaccaatgtccggcccacttagtagggcactacacctctccacactcctacaaacttcatgctcatcattgggggcggagtgggtgggctgagtgtgcaggggagaagacactgcactggcagcctctgcagccctctccctggagctccccagcctttgagcccttggtggtgccctgggcaggatgcagcagggagcccagagaatgtggcccctcactgccactactccacggcttggagtctgcaggaccacccactgctgcagctgtagctagagtctgggtcaggcacaggaagggcattgggggctgttttgaatcgggacctggaggactcctttccaccccatctcatgtctcctcatggagaggcaggtctcaggagaccaaggagacttaaaggatgctgctgttggcacagggagcaggtgtctgtgacctgctggattgagaatcttaagcccagaccctttagggacctccagcagtggctccctgtggctcatgcctcccacagaggagggacagttgctgggacactcgcctgccctgcctgctcacctgtcacgtcctgcctgcagtcactgggctcgttcggccactagagccagcccttgccctaaccttaggcttcccagctccctggcccccagcagtgaccctgccttgaccggaccccagcttccgtatcagccccacacagcccctagtccccctggacctcccatccagcatgccccctgggsctggccagtgtagctttggtcttggccacctttggccttgggcactgcattagtgcagggcaggagcagcgtgggaagaggccctttctgagtattctccctggacatgggagtggtccctcacatgatcagcgggtgccactgagtgagcatgtggacagcctggggagctatctctgtccctctacccaacccccgatggcgtctcatccagcctggctcattgcctctgctggggaaatcaaatttccaggctgaatctgattatggctctctgacagtgggcaccgccctggcccctggggagattggtccctggcctctgctttcactcrcctgcctggtggggagggtatctggtttgtctatttcctactgaggttctgattatgccagcggcrcgtgcttcgargagtggtagactggcaggggcaggactgtggggctctggagcagcctatgagagcacctaatgggctgaggatgccactttgttgttgtatgttacaaatacttgatcccaacatgtcgattgtcttttcattttctttgtggctgcttcttccattatggaaaattacaaaagcacagaagtggaragcctagtgtgatgggtcctgcacaccccacaccagcctcaccatgctggagtcatggtctgcgagtaacgccagcacccgtcatttcatcaaaacgctcactgcatgtgttgctctaaatggtgtcagttctttaaaaaacatgaccacactgtgtggcccttttttttttttttggatatacagaaagtttcattctcacaaagtcacgcttgtgcgtctttcctcgggggttctttctgctgcttggaggctgagaacagtcatccccagcccaggcaccccggatccaacacagtctgcaagggactgtggtcctggccttggcacagatggatgtggactccgccctgtgaaccccaggcccccggctctggccctgtcccagcttgagtacagtgcccggccagtgggcttggccagaagctacccacaaggctttgggcaccatctgaccacagtaggggcaacagggtaaacatggggcccccacaaggcctggccagctagggggacgaggaagtctctgtgctggcagctcccaggatgtcctcccaggcagaaggtgggtgctgggcctgggtccaactcctgccagggcacttctggcatcatttcctccttgtagggaagggtggaggggaaagggggtatgggaggaggctcgatggtcatccgtcccgtctctcccctcgaggggggggccagcrcagccctggctgtgttctggtagacagctggcaaggggtcaggatgggagccaggccccgcctgccacccttcactggcctgacccttcrgaaattcctctaattcmtcaacccacactggactcgggccccataatttcattttcyggacaaggctctggccgcactcccgaggaggaatgtctgggttgkcaagatgtcgtcaaatgtcagctttggtttcagggaaaggatttagcttctaccctcaggttcctcaccatgccttcgtgttcctgacagtgtgtgytgaccatggtttgccccagagggtttgcgggccggggctttccccacttagtgaggttccagcatttccttcctgcccaccggcccttacacagcccacccccccttccattcatgcatcgcactctgttttctccttcatccactcctccatccacccagccttcagcatcccatctgcccaccctcctacacattcttccatcatcattttatccctctaccaccacccgtatccatccagccaccttcccatccaactagccaccattcacccatcctctcatctcccctcattttcttatataaccacctattagtctcctgtccacacacttgttcactcactcagttacacccccttctatctggcctcctcttctcccatccctccagccacccacccacaaatctattactcatccatccattcatctgtaaacccatccaatcatccatctagctgtctacccttctatgacttcatccacctccctatccattcacccgtctgtctgtccatacccctcattcccyaatctgtccatccgtctgtccatcctccaccatccccccccatccatccatacgttcatccatccatcccccaccatcccatctatgcgtctgtttttctctctgtccatcgcctaccatcctcctacccacccatccatccattcatctatatcttcatctcccaccatcccccgacccacccatccatccattcatctatatgtccatctcccatcattcccccccacctacccacccatccatccattcatccatatgttcatcctccaccatcccccacccacccatccatccattcatccatatgttcatcctccaccatccccccacccacccatccatccattcatccatatgttcatcctccaccatccccccacccacccatccatccattcatctgtttgttcatcctccaccatccccccacccacccatccatccattcatctatatgttcatcctccaccatccccccacccacccatccatccattcatctatatgttcttcctccactatcccccgacccacccatccatccattcatttatttgttcatcctccaccatccccccacccacccatccatccattcatctgtatgtctatctcccaccatccctccacccacccatccattcattcatctataagttcatccttcagcatccccccgacccattcattcatccatctgtccattccccaccatcccccatccatccattcatctctgtccatctcccacgatcctccgacctgtccatcaatctgtccgtccctctgtccatcctccaccactgccccagccaccctccattcattcatccatcccccatccacccctgtatccatctgtctgtccatccttcgctgtctctcctttgcttgccctccctctagtcttccatgggctgtgtgcctggggccaccctcttctcctgccatgcttctctcctcgggccacctgcttgcccagcagtttgtcctgtgagagcacctggaggctcacgtcctggtcctggattcccttgggtacgtggccaatgtccattgtggctggggctgggtgggggctgggtcgtcacttttgttttgcagtttatttttcagagtttcagtttagccccgacctttccagccccccttcagttcctgatgttttctggttggaacatggtgttgtccacatggtcctgaagtctggtcactcgtgggctgtgcaatgtcattcctgccttgcggctaagtaaacttctggggccagcatgtttggcaagaagtggcctcctcagagttgggcatgaagctggttgctgtgttttgggtggggggtcatgaggggtccacccgacaaggcaatgctgggcccttaccaggttaggggaggccaaggtggcattggctggacagccaaggtccctgcagtgtcccccttcctagccttcccccagggccctcctgggctctagcaaaagcaaatccggtgcccactctgcccagcatccactcaggccccatcgatcttaagaatccatgcacattttgctttccttgacatcatatatttattacttgaatataaaaacagcattttgagttaccatctgaaaagcagccctctttggttctgggccaggatcccttgtatccagactggctcctgtcataggccagagtccaccatgtcaggggagtgggcctgggccttctgtgctctgcctggagcatatcccgggttgctcttgagacacctgagatgccgaggccatgacctgcgggcctagggcacttccccccagggcaaatgcagggtgcaccctgcggctggggcagatggcacaggcccagcaccaaggtctctgctctcctgagcatggctgccagactctccccacaacactggccagtgtttctggatgtytccagggagatacatgattgttttgcaccaatcaagccaagttcggcaatgagaaggtcatcgtggggtttggtcaccttcccactgtggccttggagtactgagccctcagccagagccagtgggccccctttagggtgggcatctttagtccccagagccagggtgtgctggaggggcttaggtcagggaagctgtccgcagggtctgcagcccaagcctggtcctgctagatgggggatggggtrtgtggtgtagacgagggtccatgtctctgcacagggagggaagtaagccaccccaggtccatgaggccagtggctatcctgtggtcctgattgttgccatccaaggcagcgtcccatttccttctgtcccttgcttctgaggttcggctgagatgggctggtgctgcagccaggactgggctgagggctggagtgatatgggccctgccatccgccctggccgtcccagggggaataccctaccattcccacctcgggcctagcactaggttcagtccattagtgcacaaggctcccctgtgttgggtctggggcctgtgggtagacagcatcaggtgtgtagagaagagctgtgtgaccatgcttggggagtgcagtgctgtttatccctttgctggagcgcccagtctgcacctcagtctcgggcggcggcccccagctctccctgcattcttccattctgtggctggcttaaaacagctcctccactcatgctggcttccccgaaaggttgtgttgacagtttcatttgtgggacaggtgctggggaaatggagagcagctttgggggcctgcactggtctctcgctcttgctgggcctgttttcccagctgtcggtggggctgggctccacagtgtctcttcacctatgaggtgcacccatgtccccgcaccgtgttgctggcgcagctgagcccagcgctgcttttcctcttgggggctctctgtccttgcagctggctccatccagaccagtgagcagcagtgctgacgctctggggatgtcacccgcagtgcgtgtcctccccgtggagggccctatattggtgcaagggcaagggatccagcggagttggcctcagtgggctggcgggactgggcaggaggatgcctgagcagccctgggcacccggccatgctcactgtgctccgggcagtgtggcctcgtggctatgccctgcccactgtggtgagcctggattggagctccgcatacttgtcctgcttctttttacccatgaaaaacaaacattctgggcagccagggggcaagctgggagggaaagtgctggtttgtctctgcggctgccaagccctcatggcccccgcctgctcccctggggctctggggccctgaggggcaacactgggctgggcccagcaggcccaatcccaccctgtgcttggcctcagatgcctggcccctgcccttttctggatgaggcatcacacacaccagccacttcaggcttatggtctcttaacttcatgcagtcccagccagaacctcaaccaggcttgtcctcagtttttactctgtcatgtgtagcagcaccactcttgtttctggccaatgtggatatgagtggaggctggactgctggtctgcagaccagtgttgccaggagctctcaggctatggtcacctgcgcctgcctcggggtcttgggcacccatcagtggagcagcttctcactccctgcttgctggccacactggccatgccacaccagctgtgtggctacaaatggtcccccaccctttcttggccctggcatctgcctctgtgagatgggagtggggtggccctgtgaaatggagggtgggctggcatgtggtatgagtggcagagggcctgggaggtaagaagctctaatgagctcttcctgcccttcccagcgggctccaagccgcccacggcccatgtttctgctaggtctagcaggaagcagaggagccrggttagagtcccaaaacccatggggagtgagccggctgcttccggccagcctcggattaatggcttttaatttagaatttaatcagtgtgcttccctctagagggctggatgctctggtctgggagtgagttgtatggtctgtgagtggggcgggcaggggcccatgatggccttgccaggctgtgccccaccccactgagcttactctgctttgcctgcagctggcgggcgctctggtcatggaggactgcaatgtgcactcggccgccagcatcctggcctcggtgaaggagcaggaggcccgcttcgagaggctgacacgggcactggagcaggagcggcgccatgttgccctacagctggagcgtgcccagcagcctggcatggtcagtggtggcatgggcagtgggcagcccctgccaatggcctggcaacagctggtcctccaggtaacagcctagtgacttgggaagggtgaaaattgccaagtgggaaaacaatcagtgggtcctggtggaccacaagccagcatgcrctcgcttattgcaagatttgctggggctcctggggaggaaaggaaaatgggatcccaggttgggctggaagtcccacttgggtgtactaggcaccatgtgaagagtgggcaggacacagcccaacactcagaacagcaccctccactgagccctcagggcccaggcagctggatggggtctrttctgggcagctctttggtctgcctagagacactttaggggtttgcctgcaccatgcctaaccctgccacagtgttcattgcatgcactggtgggtcagccccaggaggaggcccagagctctgcctgcagcttagaggctgacctgggagcctcattttctctgctggccattatcctcagactgggctccrgcccctactcagcctcaggaggtatagagccttctgtgttccatggccaggccctaagaactctaaagttggggtatgcagtgagcagttagaccactgggacaccccattcccagcaccccagtgctctaacctgtagatgaaacagcaagagcccctggcttggggttaggaggccggaacaagtacatgcagggagacttgggatgtggtgtgattatcatggttcctgttactgactgagggctagcacagtggggagtcagggtggagctgtcccagcagccacggggaagggggctctcctcaccacccagcttagaggctgggggggttgcctcctgctgcggcctctgggttcttcacagagtgaccctagagggctctccctgcagagtcctgtctccctggctcagctccctgccccgctaaacccagcagccagacctccccccagcatactcccagcacctgcacctccacccgcccttctttggtcctgctgggccctgactctggggacctgcgcctggcacacacatgccaggagcttggggcagcctggcccttctcatctagagagaaagggagcaaacgctggtctctgttgaggcagccccatgggctctcctcacctggctggggcatgtggggctcagaaccagcagcctgtgtcaggccgagggacctggggttggtgactactccttgagtcttggtgtccagacttggtgtcggccagcaggcgtcatgcttcctacgtctgctcatgagacccacatagaaggcccagcccagcacyagtgcatggtsagagtcaaattaatgtccccagagggtccgagactcactagggggccctttttcatggcccctggtgctcagaggcctctggtgggtctcggtgctggggccactctcacagccctcagacttgagatactccaaaatgtgaggcctctaccctcaaacttgaggcggggaagcagaacgctgggcccagctgggccatatagggacagtggaagccagtgaccccgaggccgcctctcaggcgccagtgtgctcagtccaaccctcccagaccggaactgtcctcggacaggcagtgtgggaggacccaaggcaccccggagkgttgatgccctggtgggaagatgttcccacagcctggagctaccctgacctcctcaggcaaaagacttcaagacctcaggctactgcccctccacctaccaccyctgcccctgaactctccccccgaccccctacccttgattttctcaggctgggattgaagagagcatgtgttgccagggctgcagctcaactggctgggctgatgaggatactaggggaggcagggcctccttgggctggccaggtttcccagattggtttcagtaggaagtgcctagcgatctacctgctgagccacagggtcagagcccgggctttgggaagccagggcaatggcaaggcaggtagctgggggctgaggctggggaaccaggctagggggagtgctgctgcactcactgggctgctccagggtcctggctacctgcccttcatcttccagcaggaaggggcccctcctctagacagccagctgaaacagggctgacgcccacccagtggggaggggtgccatcagggaacttgccttgggctcgtcttaggtggataggtggctggggcactagctgctggtgcagttgagaagatggagccagcttaaagataagatgcgggcgcgtttttggcrcagtgtctggtcttctgcgctctgctccaggggttccaggcaggttggccctagatgcaagatacaggggtccagccagtggtagggtagctcacccctctgcaggtgggggaactgaggctcagaggggcacatggtgggtacctagaatcttgagcatgctagccgagtggcctctgtatatggcgctcagggcagcagggagtggtccctgcggaggctgttttctgaggggtctgcggagaagccagtgggaggcctgggcccgagccctttctcttgccagacccactgagtctccctgggttggtctcagctcatttaatctcagaacctgtttccctgttcgtgatgctggagccattggcttggcctttgtggggtttgacataagaaggtggctccagcctggcccttcccctcccatttttcacygcagcagaactagattccctagggtgtggcccacattgaggctggcctgggggagcagtgggggtgcattcggggcttctgtgcctcgatggggagaacccaagatacaaagtgggggtcccctgcagggcccttttccaggtccccatcgaactctgtggggacagttcttcgcaggcccattcagagtggcggctgggcaggagggtgaggggggatctgggagactggagagatctcacagagccgtgactactgtctcatcggcccccatttcatggcaggtgaaactgagtcgcagccaggtttgtgccagtgagggaggccttgtgctctgtgcatcgcagcacgggcacctgccctgccggaactgtttccccctttgcaggcggactgaagtgtggtcataaaccgaggccaaaccgaggcctgggaaggacttggccaaagtctttcggcgggaaagtgacacccctgccgcagggagggggagggagcagaagtccaggccggcagtgggtggggggaggtggtgggargtggggggacagggggcgacccggggctgcagggccccgccccctgtctctggggggcgggacctcacattgcccgccccccgcccgccacgcccaccccggcccccgccacgccccacctgggcgcggccccgcccgattggctgctcgccgtgaccgccgccagatccgcccccgcggggagcgagtccgccgagcctgagcccgagcggccgaggcgccggagccgagcctggtccagccaccgcctcccccgctgctggccagcgccccccgagtcccggcccgatgccggccgaactcagacaggttggagggaagttggcttggggggaccctggcccggggtcggaggcagagggcggggcgtcggcctgcccgggaggacccgcttttgttccgcggagccgctggcccgaggcagctattgtcttgcgcccctggctgggctgcgtcaggctggggccagggccgggcgggtggcggtgtgagcgcggtgcccccgggtatgcagggcgggccgcagggtctctggagcccatccgcggggcctgggggggtcgggacccctggcagtttgaccctcctcttggcaccggcccggaccggatggacgcttcttggccagcgcccaggacaggtgcctggggacacgggtggagagccagggccttcctgagcggcttctgtctgtgcaggaaggaggctgaagtctgaagagggaagcccgggtaggccttctgctccctgagagggttcctcctctcccctccacaccccmtacgccggctctgactcccgggacctgcaaaggagcttccggagctttaatggaagtcttctctgcctccgaggcgcacgtgatgggagggrtagagacaggccctgcccactaatggatgctggaggagatctctaaggaaaacgggatcctccccctctcagcattgaggtggggggaggcataggcagtttgtcctctgctcagagcagtgctgggttcagtaacaggcagggaaactgagcagaggagagaccagccaagaccctctgtggtgggaggcaggtctcccacacacctgctacctgggcaactaggcccctgcctgtcctacggccctggtgtggcccccagggtctggccctcagaggtggagggaccagtttttgggaaatccatggtcacagtgtgtctgatgaccccaagctgagcttggggaagctgaggtggatgacagtcagccctgctctcccaccccaagtttgctcccccagcttggctttttggcatctctgcctggggccacgccctggcaggtgcactgctgtgtggagaagtaagctccaggtcttggagactggtcagaggctgtggcaccaagggaaagggcattttgtggtggccaagggcttgctgcctggtgagagatgccagcctggcttgtcctggactctacctgggagggccataatggggatggagaagattcattcattcatccatcggacagcagccacctcctgccctctgggagcctggcctgcaggtgtgggatccaggtgtgcaatctcaccttaactcattctctgtgtgtgctagccaggccttggacaggggaggggcctgcccctgcagtctgttcttcaggacacagaccgtggkgcatctgtgaagtccggtggtttgggtagataagtamtatgggaccagggcccagccacctgtgccccagcatccctctgtgtgttggtccaatcttgcttttctgctccctgtgttccttgcattttgccacaaaagtgagactgatgctacccagcacgtcccacgaccccagccccctctgtccttctcacctccttgtgaagaagctgagccgaaggtgcgtgatggggcccagagcccctatgctgggctcagccctgtgttcccgggaccctcttgtgagcaggggtaggtggtctacctccctggtcactctggcccctcccacaagcccaagggagctcatgggaaaccccaggcctgggcagcagcctgtttctgggccagtcctgggggccccagacctggtgcaccrgagattgaagagccaagggagggatgagtgctgggaggccgggcggggtgcaagaggagcaaggatggggccccagctggggagggggtgatgagagacgactgacaggatgcagcatgtgggattgggctggaggtggggtgttcagggtagagcccatgtctagggtacagaggggagcagcccagagttgggtctgaggcagaggctgtgtggggctgcagggccagggtccctgagagtgggccagcctgggcaggtgcaygtcagacatggacactggggccagacagggatccagggactgcagccaactcctgttgagagtcagcccaccattccacagccccaccctaaagatgttgcagagasctgagccaccagctggctatgggcctctcactactctacacctcagtttctccatctgccagccagctctgagactcccagagtggatgctgggcagatgattggcagagttggtggcccctgtccctgtgtgttgagactctgtgaggccctgcatggataagggtctccgatacacggtggaggacgggaggatgtgtgctcacgagtgtgcctctgggaacagtgggcgccgtgcccttggggtgctgttagagcacacgggttgatgtgctcggcctgtgccgggctgggtacttgcacacgtgtatgtacatgcatgtgtccctgtctkaggggtcatgtatatgcatgtgtgtgtgcctgggcatgtgtagcaggggccgggctttcctgtgatcactggctgactcatgcacctgccacccgggtgaagtcatccctcgtttttagctccctgaggtcatttgccagcagggactcttggggcctctggatcctactgcggggctgctaggccggggctgatgggtggtgccgcagggttgccaggtcttgctgcgggggcgtggctctcctggaccaccccagctctgcctgtcagaccctcaccacagccttggtgggagggataagctgggccacagagtggcatcggggtcctgagatgtcctccccttttcctctcccgcttacccccactgcctagctagggaagagggggtttttctctgagtttttaatagatgtaaatatatacatatatgaggggctacatcccactggcagagtcctgggtaacgtttcctcagtcttgctttataccctcctcactctgtcgccagaactgcagcccctcagtgcctgggcccctgcttgaactcagatgagccccgcccrgggcccagcagagagagctcagggcctgacacacatttgccagatacagatggggcagcccagccccagcagtgatgggccacacaagccttctcctgcttcagagcagtcccagctccccagtgcctttggagaagagcccagcctgccctgcctggcagcgtgccagttgtccccactctaggcctcagtctatttctttttcccagggaacaggtccccttttcctagccaggtccacagcaggcattccacctacatctcaagactgagggcgagatgaggcccaaagccttccttgccagattgccttctctgggggtgcttgaaatcccacttggactgtgaagttctaggtaaatcctcttccccctgccaggcctcagtttccccatctataaagttatctgtcatcctccaagaccctgcctgtgggagagggggaggtgccttctgtggccacttctttcctctgtcagcctgagggatacacctgtcctaacatgttggtgcaggccccttcctggacacctgcactgcatgcatttgggggtcaagtattcccccaggataggaccctgacctggggaggcttcccagcccacgagccttggcaggcaggtcctgagggcagcgctgagcatctaacctggctcacctcycaggcccaagaatgggcagagtctgcctctggagcctggcagagcttagtgtctgtgcaggccccagggggcccaggcaagggacccattgtgcagggaccaggggcctgggccacaaagcaggacctgtcctcctgctgaccctgccctggctgcctgggaatgtgctccgcctgacccacccaccagggcttgggtttcagctcctgcccatcctggctagatgccgatccccggatgttggtgccatgtggccctggggccaggcacctgtgcagtcagaggccyggggcaggctgtgagtctyaggtcctcaagccactcagcgcggcaggggttgggmctggctctgatgtgggccagcctatcctctttgagcctcagtttycccactggcaagtccagtcagtaggcatgtggatagaaaagtctcagtccagagttgtcttgcctagaattccagtgtcgtcaccccatgcagaatggtggcaagggcacccataggctcaaatctactgtgtctggtctctgatatgatgcccagagtctcagtcactgggggcgccagccactggcccgaggtagggcaaacctgtgcctacacaacactcaagaatgtctgggctggaaggaataaggacatactggtgctgcaggtgcatggggtgttctgggaactgcgtatttctgtcccttgagggcgtctggctggcgttggtggcgggaaccttagtgtggccacaggagtcagtaggcagtgctgaaacagcccccacaaggcttctatactcaaggtgtctggggcaggtgagggaggaggccccaggacaccatgatgtcccagctaggggtggtggttgacatcaggaaggcatsctgcaggtctcactggcacctcctggggcctggaggagcctgtggcagcmaggccatgcagcttggggagggccctgaagacttcaccccccagggtctatgtccttatctgccaactcagcctgaggagacctgagatgggggtccagccccagggtccccccaggatggggtgccggggcagggttagcacctcgatgttcagagggcaagaacttattgctgtccttgtcagcttgggccgaaacaggccttggggtgggtgggttcaggaccaggaggaaggcaccctggtgtgctggccagcatgagctgagncagagctgctgtgtgtggagacctgcactccaggggtgactgagcagcaggcctgcccaccaatgtccctccttgccccaggagcagagcccaggcagccaggcctcactggccacgatgccggaggcacctgatgtgctggaggagaccgtgacggtggaggaggaccccggcacacccacttcccatgtgtctattgtmacatccgaagatggcacaacccggcgcaccgagaccaaggtatggccaggcccaggcagtgggtgggtgagcagggccaggctgctgcagctgtyccacctgcagagtggacatggaagcttgccacgtggggcctctcattgctcgagtgggaaattaaggccagccagaccccagcaaagcagtttctaggcctctcgtgctaccccacctacctgcctatccatccaccaggtcaccaagactgtcaagacggtgaccactcggacagtacgccaggtgcccgtgggcccagatggactccccctgctggatggcggccccccactaggcccttttgcagatggtgccctggaccggcatttcctgctgcgtggtggtggcccagyggccacactctctcgagcctacctcagcagygggggtggctttcccgaaggccccgagccccgggacagccccagctatggcagcctgtcccgagggctgggcatgcggcccccacgtgctggcccccttggccyargccctggtgatggctgcttcacactgcctggccaccgggaagccttcccggtgggtcctgagcctgggccaccaggtggccgctccctgcccgagcgcttccaggcagagccgtatggcttggaggatgacacgcgcagcctggccgctgatgacgagggtggccctgagctggagcctgactatggcacggccacaaggaggaggcctgagtgtgggcggggccttcataccaggtgagctgcaccccgtcccctgtggctacctcctctgggaagtctgccctccaccccccaactacagagtgccccacttgtcaagtggcgcagttgagttagtcatgcatgttagtttgaattggccttggctctcgtcagggacagaagaaaggtggaccctggggtggtaggagttcggctgggcactgtcctgcaggcccagggcccaggaaagctgggaagagtgccggccactggccttgctccagccacactctgggtaaccagaacccagagccctggcccttgtcacagcccctggttctgtccccattgccctcagtttctgcatctctggagtggggatgtgaccacagcccgggtcaggattttgttgtgtgaccctggccaagtcacctgaccgtcactcctagcctcagggcaggcggtttgatgacagcaacccacagggctactgagagctaaggagatcttgtgccccaaggggctggtggcctgaatactcctcaggtggtcctactgggatggcttcatgcggagagggccatttactccccctacatcctggcacagccagagatgggcctcatggaagatggggtggttttgtggaagggaggtgagacggtctctccagcagccatagcagatgtctcacagaaacttgttttgctcgggattgggaaactgcccggtgacagcagtgagtgagtttgctgtcctgggagggttgcctgggtcctggtagccrctggctggggtttggcatttggctctgaattggttctcactgggctggtgcatgactctctgtgtccccaccatgctccgggccaagatacaggtgctctcagcccagcgctgctgggtgagtttgcagtcctgaagaaggtgtgatggggcagctcagaggcagggctggmggctgctgtgacgatgtccacgcgccccacttgcctgtgcagggcctacgaggacacagcagatgatggcggcgagctggcggacgagcggcctgcgttcccaatggtgacggcgcccctggcccagcctgaacggggcagcatgggcagcctggaccggctggtgcggcgctcgccctcagtggatagcgcccgcaaggagccgcgctggcgggaccctgagctgcctgaggtgctggcyatgctgcggcaccccgtggacccygtgaaggccaatgcggccgcctacctgcagcatctgtgctttgagaacgagggtgtcaagcggcgtgtacggcagttgcgggggctgccgctgcttgtggcactgctggaccacccgcgggctgaggtgcggcgccgggcctgtggggcactgcgcaacctctcctatggccgcgacactgacaacaaggccgccatccgggactgcggtggtgtgcctgccctggtgcgcctgctgagggctgcccgggacaacgaggtccgtgagcttgtcactggtgagtgggacctggccrtgctcacatcccctgggaagaraagagtgtgaggctcaacccgggaggaacgaggccactcggcctgcgaccgcctgggaaagcacccggtaggcaggagtgcagctgctgagacgcttgccccaggagccaggcatcaggcccagacactgtgacaggttccccagtctctaccatagyagggaggctgacgctgcgcccctcgggcatgtcccctcacctcctgccttcacacctcctgcccccacagaaactctcctgggacccacctccttggttcccaccccaaccgtgcagtggtggggcttgtgccttgtgagagctgagggacaggtagggtcaccgtgtctctgtgaggccctgtggcctcaggagtgttagtgccacctgccacatggcagggaatgggtgggacgggacagcactgccacaccctcctctgcacctcctcccctttggggctccttcctagctggaaaccagtactgggtgtcccccggaaccactcacggcttttgttacttcctactgttctgcatgagctgggacatgaggagagtgggacaggtcctgagcgtggccacctggggaggtaggcagrcggtgcatatggtcagcacagattggccaatcgcaccccacaggcaccctgtggaacctgtcatcctatgagcccctgaagatggtcatcattgaccatggcctgcagacgctgacccacgaggtgatcgtgccccactcaggatgggagcgtgagcccaacgaggactccaagccacgggacgccgagtggacaactgtcttcaagaacacgtcgggctgcctgaggtgtggaccagacctggtgctaaagcccacatgcacaccaggccccgtcctcgtggtcccagatagtgtggaagatggcggcgagcttaggagcgccagagcttaggagcttcagagctgtggcacaagtcctgtggatgagaagtggggcctgatggagctgtcctcacccccaagtggtgtcccagtcttcccaggggcaccctctggaggggtctctgtggtaccgtagccctgcccagctctcacctaccttcccatcacttgacagccagagggggagctgggaccttcctgttcatctgcctgggaggctcatcccagccacctgtgacctctgcccttcccctcctacccctgggaggccctgctgaccccacagagtcctgggtccccacagtcctgcttgtccatcagggtgttcccgcgcagccctgcaggctcttgaccttggggtaaggtggggcccagagctgccattggggtggcgagggacccagaattgcccttgcacaggttcaggtctctctgagagtgcacctgtccctttccaggtcagctgggaggcagggaaaccctgtctttccctgcccagctatccccagccaagatagttgtctgccagggctcccctcctgaggcctgggggcagttagcttctcccccttcactgagctccagactgtggggtcctttcccattagtgctaggagggcagcagcagggcctattttgcagatgaagacaagcccacaaggccagggtggagccagggagtttctggtagccaggggtcacctggcctgctcttggccacacaggaatgtgagctccgatggtgctgaggcccggcggcgactccgggagtgtgaagggctggtggacgcgctcctgcatgccctgcagtcggctgtgggccggaaggacactgacaacaaggtgggcagggacggtcacagcctcataccaagggctggagagacgatcatgcaggtcccaggaggctggaactgtgggagcagcacaggggaatgggcttgtgggtctggggtggcgttctgggtgtggcccgcctcgcagtgaccacactgaagtgggcaccgtcctgcaggcagaaggtgtgccgtgagggcagaggcttcctcccatggacccttcctggcggttaccgcccttttgctcccctccactgaggactccctgttcctttgctcccggtgccctcatgcacaccagctgtggccagtctttcctgagggccagccctgtgcctagggtgccctgccccacccactcacctctccctgcagtcggtggagaactgcgtgtgcatcatgcggaacctgtcctaccacgtgcacaaggaggtgcccggggccgacaggtaccaggaggccgagcccgggcccctgggcagtgctgtaggctcccagcgccggaggcgggatgatgccagctgctttggaggcaagaaggccaaaggtgggtggggcggactggggtatcatctctaccatctcaactcctgccccagcggaaggctctctgtacacccacagcagcccatcatggaggctagaggacacctggtcagcccccaacaggcaggcagggaagccaggagtcaaggaggctggactgccctgggtcacatggttgatgggacccaggtccaaccttccccatctacactgtgggacccccagggagtacacaagggaaaccaaccaatgcccagacccagtctttctactccggggagagttccacttgcccatgagttgggaaggagccatggctgctgcctgctcactgttcacagaatagctgtagactgccaccaacctgtggggcagcccccatctgcctgggcaagatgccctgcacaccttctctactgcactagcagggtgtaggttcccaggacctccccagcagctgtgggggacctgtacgccacctgcccctgccccactgaccccaggcctccctcttcttgtmcccctggtgggtgctcagtgcccagaagtgatgggatgaggttccacatgctgcctgcttgatccagggtgtgcagtgggaacctgaggcttccgggagggcatgggggggtgatgagtgctgcctgttcaggctcctctcctctctcctctgcttcctccggcctcccagaggagtggttccaccaaggtgagtccctttttatcctgctctccaggcctggcgtgtgcagtgggtacctgggaagaggcgagcacgttccagccccagggccctgccccacccctggcttcatcactcgggctgccatctttatgacagtggcaggtgggaaggccacggggctcattctgtaacctcagacttgcctacctgggcagagttgggcagagccaagagtgggcagggcccgggggtacttatctctaggggcaccaaggagcagtctgtttctctgatagaatggggcatcatgtggctcggagggatacaagggtcccatgagggtgagcagggcagggaccccaggtcatctggctccactctgctgccttctgaaggggtagaagcatcatctgacatggggagagtggttgacagtgggctcactgtcacagacgtgtgcaagccagggctacacaaatgttaggtgggctgctgtggggtttctcctggctagtagatcctgggacaatgtcctgaccccagctgggggagtttccccctagttctgccttactgtgtgacccaartgagtcttgtcctggtcagccttcagtttcttggcttgtatccacctaccatccagccagggctcctggcttccctcagtctacatacctggcagttgcaagggagccaccgggagggtctgtggtacagctcccagcacctggtgggagatgagtcctaggggcagggctgggacatccccaggccccactgccaccaactcctacccctaggctaaactgtctgcccaaactctgacaacggtgctccactcccacaggtgcccaggcctggacatgggggtgccttttggggcctgggtaggagagaactgtgcccaactctcctgatacacccattccccatatggggtctgcctcacctcccaccacctttcccttccaggaaagaaggatggtgagatggaccggaactttgacacgctagacctgcccaagcgaactgaggccgcyaaaggtgagtgggctgagatgaagccagctccactgggggatgtctgggctcaggattgccctggtagtgaagctttgagccatcaagcaggcctggagggcctcagggaacagatggggaaacaggcccctaggtgcaggatttcctggagggtgattcagcaccaggacacctgctgagggtttagaatgggaggaagtgccatgggtcatgtcaggcaaggttgggggagacaggcacagagaggcmgagggcttgctcggcctcacggtgcgtaagaggtgggaaggtttggagggacgcctccagtggaggcagggcctcctgtgttagccacaaagctgagttatctgagggggctggragccaggcgggcatgctcacatccaggttcagaggctgggccagacgaacacctgcagggrcagggcagtgcctattgrgctgtatgctgggatctggcttgagagagaggtctgtcctggtggggcctagccagttggaagagcctgcatgtcaccagggtggagggctccagccgcaggagggctgtgggggagtattacaggcagagcagggctgatgcagataccccagcggggagtgtgcttggagtgtgttggagcagaaagcccagcagggcaggagtagagggagcatggggcatgaggactggcgagggtgtgatgaaatgtcactgggtgggtacaggggagatcgaggtagtacccaagccaggctgaagccccagtttggagacaggcaagcttggaaggctgttttgacccctcatttctggagcactgggcagagcagcaggacggcgcctcarttgcccgggaacttggagtggttgccaggaagagtgcctcctgttgctagggcagctgccctggttgcactgcatcagttgacttacagagggtgggctctattgtcagtgggggagggtgggccctgttgctagggggcgtagctctctgcacagcttcagttactggtgaaagcmggtcctcttgctaggggtgtggccttggttatacaactctcagttactggccaatgctggtcttgttgccagggagggtgggccctattaccaggggcgtggccaggatgcatagcttcagggacctaccgggaaatgcgggtcttgttgctaggagagcgttcctggttgacacctccctccccaccccaggcctcctggatgctcctgctgccaggcaggtccaactgatttgagcctcagtttgytcctctgtgaaatgggaacgcttttcccyttgggtgactatatgttgatagtaaatattacgtgactcatccacacccatccctggccccagctcacccacgccctgggagctctgaagcgggaagcgggaggggtatgatggatgagagcagattctgggtgaccgtgggtggcggttgccctgcacctaggctttgagctgctgtaccagcccgaggtggtacgtctctacctctccctcctcacggagagccggaacttcaacaccctggaggctgccgccggcgctctgcagaacctcagtgccggcaactggatggtgagggaccaggtcgggcagggtgggcaagtcctgagagagggaatcccaggcacctcactggtgcagctcctgcctcggctggcggggaaaggaggggccacaccaccaccccaggatccaagaggtgtatgggctgcgggcaatgcgtgcaccctggacggtgggaaaacctcggtggaggtgccgttgagcttttggggtagggctttgtcgggcacgggagcaggaaggtccagctggagagagcggtcagcgtctggaggtgggagagtgcctggcatgtatgtctgagcaaccctctccccgcctccgcagtgggccaygtacatccgcgccacagtgcgcaaagagcgcgggctgccggtgcttgtggaactgctgcagtctgagaccgacaaggtggtgcgcgccgtcgccatcgctctgcgcaacctctcgctggaccggcgcaacaaagacctcatcggtgaggacgcctgcaaagcccacgcctgggcaccgaactgtgcctgcagctttggggtcccatcrgaggggcttggaggatgagtggtttgggagtccaggccccggccctctcgcttgggcgctgtcccaactggaggtagctccagtccccccrgccctgtctctgaagctcagcgccctgctcacaggggctcctgtgaccgcctgcacacaggcggtctccaggggctctcctggcagtgcccctcgccctcgcgggatccctgctccttcctggagaggtggggcagaggtgtgttctgacacctagtcctgcccctcagggagctacgccatggctgagcttgtgcggaatgtgcgcaatgcacaggctccgccgcgaccgggggcctgcctggaggaagacaccgtggtggcggtgctcaacaccatccacgaaatcgtgtccgacagcctggataacgcgcgctcgctcctgcaggcacgcggggtgccagcgttggtggctctcgtggcctccaggtgtggaggggcggggtcggtggcttggggagccgsggaggtgggggaggggccaccactgaccccgcccccggccccacagccaatcggtacgcgaagcgaaggcggcgtcacacgtgctgcagacagtgtggagctacaaggagctgcgtggtaccttgcagaaagatggttggaccaaggcgcgcttccaggtgcggcttccctggccttccttccattccctgctcactttgccttattcccaytccatgtgcttcacccaccctgtgtctgtgttttatgtctcagtcagctgctgctactgccaaggggcctaagggagcactgagtcctgggggcttcgatgacagcacgctgccactggtggacaagagccttggtgagtggtggagcttagggagcctagagggtggcgaccccagctgccccagttgcctgacccttgggtgarggtgaaggaggagtcaggcctcccactgagacggcttccataggccaytttccctgccctctgcctcttggctactcccttcccacagcatccgcgctgttgtcaagctggggtgaggctgccagctggcagaggttgggcaccttagtgacagagagcctctagggctacctgggccagccctgtgtgggcttctctgccccgatcccccctggctgccacatgcagcccgyctcctcctcctgccttgcagagggcgagaaaactggcagccgggatgtgatccccatggatgcgctgggcccaggtgagtgcagatgcagtgtggttggttttctgtgccgggaggggaccaaggcctgaagtgggcctgctggttttatggggtgtagatggtgctgggtggaggagagatatttggtttaggggtgcttagagggtraggtacagggcagctagagagggattagtgctcagccaggggctctgacccacaagtggaggggagtctggagagttggcagggtgttggtgagagctggcaccagcctggatctccaggacagggtgggtgggggctgtctcccaaagcccctgtcccacgagtcccctgtgtctgggctgagagggagatctgctcctacagggcctccctcagagcgcccctcatgccccaccttaccccatctacagacggatactccacggtggaccrgagggagcggaggccacggggcgccagctctgcaggagaggcctctgagaaggaacccttgaaagtaagtggtcatgtggctgtgggcaggtccccggtgaggcccygtgtctaggggttgctggagagcagcctaggccatgctgggtctggtctgggccctggggtacagctgggttgtggggccaagcccaggaagcagccccttcacgccagtcagtctgtgggtactgacaagtttgcagctcccacccactggggacaacactgcccggccacaccctgcatgggccagagcctgtgagctagtgtgtgtgcacccttctgtgcatgtgcgtgtgagagcccaccagggtccaccagcgatggcaggacctgctgcctgctgtgtgccaatcccctggcttcctgtgcaggcctgtgtgtgtgcacgtgcccgycctgggcccgtgtgagccacaygtttccggctccctgcgcccttkgtgctacctgtgctgtcctggcaggccaacccttacatygccagcctcggccctgcccctgccctgtccccccaggagctctaactaacctgctctattgtgcctctaatgcccacccgtgcgctgcagctcgaccccagcaggaaggcccctcccccygggcccagcaggcccgcrgtcaggctggtggacgccgtaggggacgctaagcctcagcccgttgattcctgggtctagcttgcatgcctggtacgttctctcatctggttgttcgtccacctgttcctgccctctgggccagggcttcttgttagtctcygctgcctgcacgctctgctcttcccgcacgttccccgcaggactttggcctccagtccagcagcccagtggcccattcccggaaagaccaggcagaggtcagagagggagggtgctccctgggcccacagccctgtcccaggcactgtgggatcaggggcctgaggaaatgggaccagagtagggatgggcaccataccctccaacgcccttcggggaccagcaagtcaggatcagccctggtgccaagacccttggggtcagcccacaccacccagggcagatgcttctatccacatctccatccatgtagcctgtggagttggctgccctgccctgaggttacacgtggtcctgtgccactcagtggctgcagcgtccaccatcccctttccctctgcagggcccaggcccagcctcttgttcttagggcttggatcgtggaagaagggccaccctgagcagatcgtgccgtggagcttggagccccctggcggcaggggttggcagcgcctcgccccagccaagcctgactttggggacaccctcctgcccccccaccccactccccccatcctacctaactccctaggcctgagttagctgtttactgacatggtgctgtgtgtgagcgagtgacagaaggcccgaggaggccgactgggctgctggggcagggcccagggaggtggcagggaagggtgcctggctgggctttggggctggtgggataggagggtgcccctgggaacacagtgccccagtggtgcgggccaggtctggcgccaggggcaggcagctaggcagggagggggctgggaaagaacttggacttctaaaggcggagggtctccctgggcaccctgcaggcaggcagaccacrgtgtggggggtgccccacaaggcycagccctgggcaaggaagctttggaagcagcaaggtgggggtcaggctacaggtgccccacctccccagagccctgcagtcacgtgaggcccctgtgcagtagagagcctttctccagcccatgctggctgkggccggggctgccgcatctgcctggagcctgggcagcacctccgggactgaccttcggcagtggctgggggactgctttcagtgcctgctgttcgtgactcagaaacagaagaaaaacactgagaaaaagcattaaaaataagccaaaataagactattggtaaacacctaaatttttgtaagaaaatttaaaaattaaagcagcaaaggaactttttgctttctgccactcaggtctggcacaagtggctggcttctcccttgtgtcgggcctctgcgcgtctggggcagggccctgggtggaggtggtcccaggtgcccatctgctgtgtcctgcagaggctctgtttctggtccctgggtggccccaaacttgtccacttgggctcactggtctgtctatccataggagtgggctggctgggggctagccaggccttgagcccaggagtagaatcttggctaggggctggtctcggtgcaggtgaactcagctagcacagggttgattcctgtcctgggcctgggaactgggcccttggagcctctgaggtggctagcagtctgaccccttggaggagatggggacagctctaggtgtaggtggrcagaaaccagcactgcatcctcactcatgggccagggaggcaactacagggatgcgggagctggtctgagccattgcctcttctgtaagcaaggcccagtggggagtagggaaggagatgcttccactctgtgccacatggggcccagaggggctggtgctgctgcggggtccacctgtccccagcgcctgcttggtcagaaaggtgtgaatgctggctgactcctcttcgtttcccaggctggcagtcgtccccatggggctaacaggtgcccctggcctagctgcaggagggctgacctctgcaccactgtggctgggaggccagtgggccaggcgtgccacccagaacccagccagctaggggccccgcccttagcgttagcgtccgtcaaggggagctttgaatgtttggtgcccaagtcaagggcagcaggggaatggcagttgagaaggatgtactaagtcgagttatatctaaatatttagattcttaatttctattttatatttttaaaacatgatattagtatataagataatatagctagccagtgttagtaaagaagtcatgattgagtcttaaaaaagaacaatccagtgttgcagttcagagaggttagcatgtcagggcgcaggcctcggccgaggtgtgctttgcatttaggacacagcccggagccgcagaaggtcagcaggagcacgtctggcaccttcagtaccaggctgggtgagagagcccgagaggggggccggggggggcagtcagggccctgcttcgctgcctgggcccttgtagatggccttctccaggccgtccaccacctccctgtattccaggaacgattggtagtgtgtgcactcaaagcagctgctcccgcgcacgtgtgctaggaagtctggcgcacctgggcagatcacgttgtcagccagtagcactgtccccttccgcagcaggccacattcctgcaaacagaccggggggtgggggaggtgagggtcagaggtgcccagagaacctgccccaaaccaggatgggtgctcctcactaggccacggcaccacgcctgtgcctagcccctggggccaggtttccactttctgcccagcgtgactcctgcaggaaaggactgtacaagacttgggtgccaccttcagaacatgggccccgtgaggacagggacctttctctcatcaactcctgtatccatctcaggagtatccatcccttagaacagcatgtggcacacagtaggtgctcaataaatgctagctgggtgagtggaaacaatggggccctcaacacccagtgccaggaactcaggcctatgagggagaggcacccaaggagaggggttgctggtatggtccctggagacaatattggcctgaccagggtgaccctgcagggctgaggtggggcagacctcccatcaacaagcctgccccttggggtcagttctggacatccccaagctcctgcatttgcagaccccccatcttcaccagtgcctgggccctgggaggacacagagttcctctgcctgggttctgtgcagaaggaaggagttgttactggacacgcagccatagggcatggcccgtggggtccactatcgggagaaacctcataggatgcttgcctatctatgctatcagaaaagggtttgcttacatcacataaacaagaaaccttgagaggaagtgtttgcctatggggaggaaggacctaccagggcaagggacaccccagtcaccttgtcttggaaatttgacttagtcaccaaacaaaagttaacaagcaatctcaaacatctaaagtataataaaatcaatttgcaggcaggtgccttgaaacactggtatccgaccccacatgcctctgggatgggcctggagagtcccacagggcttgcagctgtcctggtggtgggtggcggtcgtttccagcctgtatgctgcagagaaagcagggggctttcatgtgacagtatggacaccacacggctgcaaggtcagtgaggtcaggggacagccccaaggtccggagttgagcaggaagtaccaccatgaatcatgatgtgttttcatttagaaaaaaaaaaaaatgtcctagcaatgtcagctgaaaagacgtagaacaaagcgccacccgggaggaggacaatggcctaggccttgagcagggcggctgccttccagtctgggccagggaatgcatgagtgaggggcctgggctcctggacttctcgggttgcgccaggggactcaggagcccaatctggtcatcagggatacagaagacgtcagcggactgaaagacaccagaccactgcacctgcacgagttaaacaggaaagaaggagggaagggcagaaaggagcatgggtcacctttggaggctgccaggggcccactcctttacgaaactggtcaagaggggaaagaaggcagcacctgtcctgcctgtcgcccgacactgcaagcctcctaccagctactcagaccacctggagaactggctaaacatgcatcagcgtctgagcaggactgaaaatctaatgccatggagaagcgacagtgtcagaggagcaggtgacactatgctgaggtggttttcatctggcccaccctccttagactctcctcccttcaagagttggagcctcacagaggttgcagggagccaagatcgcgccactgcactccagcctgggcgacagagcgagagactgtctcgagaaacaacaacaaaaagttggagcctcagaccaagcacacacctgtactcccagcactttgggaggttgaggcaagaggatcgcttgaggccaggagtttgagaccagtctgggcaacatagggagaccccatttctacaaaaaatttttaaattagccaggtgtagtggtgcatgcctttagtcctagctactcaggaggctgaggtgggaggatcactggagctcaggagtttgaggctacagtgagctatgatgtcatcactgcactccagcctgggcacagagcaagactctgtctttttctttttttttttttttttaagggggaactcattcctcttcctttgggcatgggctggacttggtgactacagcagcccggtggagaggcctcctcaaagcagcccttgattttgaattgcaacctgctcctgagcccctcaccccccgtgcctccgatgctcacagaacccactgaggggatggctagaccctcacaagagccaggttgtcccctaaccctccacaagggggcacagggccccagccctgagtgtgcagatgtgcgtttaacaaggacacccattcccaattcatgacttcccacttcatgactttgcttcttttgagataattaccagctttgcgcaagcagcactgagaaaactattagtttcctagttactaaactgcaatgtttgctacttttctatgaaggcaggcccctgtaattagcacccacatcacagctgctgaaactcggccgcagtaacgcaggcccagctgtgggtgtctttcctgcccaagtgaagcccatctggctgagtgccagctctctgccatcaatacccaattgccagcatcatgctcctttgtcaggggtgagcccccctccagctaccctgtcttggcctgtaggtctccctcccaccctcccaatgcccacccccttggccactacaggtcctccctctccacggccagggttcagtgcctcctcgtgagttcagggcatctgaaatgccctccccacagccctctccacactccacaaggctgacagggatctttccagaaaagtttttgttgttttttgttgttttaaaagctggaatacggccggacgcagtggctcacgcctgtaatcccagcactttgggaggccgaggcgggcggatcacgaagtcaggatattgagaccatcctggccaatgtggtgaaaccccatctctactaaactacaaaaaactagccgggtgtggcagcgcgcgcctgtagtcccagctactcaggaggctaaggcagggtaatcgcttgaacccaagaggtggaggttgcagtgagccgtgatcgtgccactgcactccagcctggtgacagagcaagactccatctaaaatatatatatatattttttcttttgccatgttgcccaggctggtctcgaactctcctggcctcaagcgctcctcctgccgtagcctcccaaagtgcaagggttacaggcatgagcccctgagcccagctccagaagacaggtctaacctcatcctcacctgcccaaagtcctgtgtgccctgactcccattgttcctggaacattctctgccctttcacacctcaggcttctgctagtgctggttccttccaatccgtgtccagggtccagcggccctacctagccaggcatgggggctgtgcccctcgtgctcctagtccggctgctaacagcagtgtccagtttctgggagagctgcaggtgagcgagcaccaggtggggaggccgtgagggtgggtgtcccaagcccagtggaggatcacagagccactcagtgtcgctgaccaccagggagggatggggcagtgtgtcactgatgtgaggctccttaagcatcagtctgtgaagggccaccagtgccccacgccccccagggaagcgaggacagccccacccgctgtctagcctcactcggggcactcagggtcctcgccagtggggctgggttgggggaatgcacaagatggggcctcaggaggaagatctgcaggagacacatgctttctttgcacgagcagtggcttgcttgggggagagcaggctgggcccagagcggcccttccccaccccatctccttggtcctgtgccgtttctgccctggtgtctggtctggggtgtgcaccccacttctgccacccattttgcacctgcacaggcagctggctccccagttcccaacaggccacccagccaggcccctggcccagctccccacccatctccacccaccacagggcctcctcagtcccccacactcccagacctcaggtggtgcctccagagcgagctgtgtccacacagggctctactggaatgcctggctctttggagaggctgaggctgactgaatgggctctgggcagcagctggcacggatgccatcctggttggggctcacctccaagagaagcgtgtccggcaggtaccggtccttccagtggtcgaggaagaccatgtccagtgtgtccacatcatacttcttcttcagctgggggatgatgtcctgggacgctccaaccacaagggtgacctggaacagcgcctgtcagtgcccacgtcctcacagacaggaggccatccctacacacctatacaacagcgcctgtcagtgcccacgcccacacagacaggaggccatctttacacacccatacaagcattcatcagttttctttagggttctgggatgacaaggccccactctgtccctgcccctcctggtgccaccttggcagtttacccagagctgtgagaccctcactgagctgctgggggggtctttcctcagccccaggctgggaagcactgaggggcctggtgatagtgggttttcagtgaacgtggtgtgaacacctggtggggaggacaaagtgcgcatgccctccctgcccacagccggccctttttccaggtctgacaacgggtcaggcatgcacaccttgtccttcatgccagcgaaatccaccatccgctgggtgatggcggcacagtcggggttgatctcgatggtgatgagcctcgcccctggtgacagcaggcgggccatgcgcacagctgagtagccacagtaggcccccagctccagcagcacggagggctggtgctcctgaatcacggcgtccacgatcttgcctgtgcagggttggggacggaggagaggtgagcacaggtggagagaggggaacttggatccccaggcacggccccccacctctcccaaagagcaggagcccctcccaaatgcctggccgctggccct

SEQ ID NO: 93970 - DNA, 77682 bp, Homo sapiens
  misc_feature (1)...(77682): n = A,T,C or G
gagaagtgaccagaagacaagcgtgtgagccttctgttatgcccggacagggccactagagggctccttggtctagtggtaacgtcagcgcctgggaagacgcctgttacttagcggaccttggtctagcagttgcgtcagtgcctagaaaaagcacccgttacttagcagaccgggaaaggaagtctccctttccctgtgggagttagagaagactctgctcaaccacctcttgtggagtgtcaggtctgcccacagttatccggaggcctaaccgtctccctgtgatgctgtgcttaagcagtcacgctcctggtccgctttcatgttccaccctgtacctggctatgccttctaactagcagtaacaaaattagtgaaagtactaaaggtctctgaaatacagaaataatgacataagctgtctcctctcgctgtccgcctcggctgccaaacagggaagggcccccgtccagtggacacgtgacccatgtgaccttacctgtcactggagatagctcacactccttaccctgcccccttgtcttgtatccaataaataacagcgcagcctggcattcggggccactactggtctccgcatcttggtggtagtggtccccgggcccagctgtcttttcttctatctctttgtcttgtgtctttatttctacgatctctcatctctgcacacggggagaaaaacccacagaccctgtagggctggaccctacagaatttcatgcaaggtgctgtcaaataaaaaatgttatttagggccggacgcggtgactcacgcctgtaatcccaacactttggaaggccaaggtgggcaggtcacctggggtcaggagttcaagaccagcctggccagtgtggcgaaaccccatctctactaaaaatacaaaaattagctgggtgtgatggtgcacacctgtaatcccagctacttggggggctgaggcaggagaatcgcttgagcccaggaggcggaggttgcagtgagccgagatcgtgccactgcactccagcctgagcaacacagtgggactctgtctcaaaaaaaaaaaaaaaaaaaaaaactaaaaaaaaattttttttaatgctatttaaacttccttgagttacatgcatattggtaaatgttaatataaggattccagatattgtataaagttcccacaaactggtgaatacccttctgccaatgacatgtcctcatataacagcaatcatcattctggttattatttaaaatgctatgtgtcataaacaaccaacattccttgtaaatcgtttgattttgtaatgatctctcattagatatttaactacactattttaagtcttttgtcattagagttttactctgatgctttcctgaaatctcttgcaatcagctacagggcaaagtgcttcatcttcaacaaaaagggaccaatgaaaaggcccatgacaggtaccatggggtaggcttctgacagcatttccttatttctttttttgagatggagtctcactgtgttgcccaggctggagtgcagtggcgtgatcttggctcactgcaacctccatgtcccgggttcaagcgattctcccacttcagcctcccgagtagttgggattacaggcgtctgctaccacaactggctaatttttgtattttttggtagagacagggtttcaccatgttggccaagctggtctcgaactcctgacttcaagtgatatagccaccttggcctcccaaagtgttgggattacaggcctgagccactgcacctgggcgtgacagcatttcttaactttgagatcacatgactgcactgagccaggatctccactggttgagaaaagatgggttcatgtacctgctagcccaagatcaagcagaacaagaattcagtacctgcatgcaactgagtaaactgctgaaggatgattacagtctttttatgacttttgttcagaatattgttggctctttatgttttattttctgaatattaaaaaaagaaacctttccccggctgggcacggtggctcacgcctgtaatcccagtactttgggaggccgaggcgggtggatcacgaggtctggagagcgagaccatccttgctaacacagtgaaaccccatctctactaaaaacacaaaaaattagccgggcgtggtggcaggcacctgtagtcccagctactcgggaggctgaggcaggagaatggtgtaaacccaggaggcggagcttgcagtgagctgagatcacgccactgcactccagcctggggaacagagtgagactctgcctcaaaaaagaaaaaaagaaagaaacctttcccttttctcttaacctatcaatgactcgtaatattatagtaaatgatacttctctaaacaaaattgaagcaattatcttt[450 bp omitted]aaaggctttaaaaagctcaatctaagattccctattaaaagtttcagcaaacttaaaaaggcctgtgtggtcaattactgttcgtgctgcatttatgtaaataatcaggccaaatttaatgagaccagaattatttggtaaataagaataatctcactttgattatcttcaatcaaaagggaagggtttgtaaagagaaatgctatgcttcagtggagaaatataacacccccttgggagttatcagatcctagtctagttcactgtcttttgtaggtgttttgttttgttttgttttgtttttgagacgcagtcttgctgtgtcgcccaggctggagtgcagtggtgtgatctcggctcattgcaagctccacctcccgggttcacaccattctcctgcctcagcctcccaagtagctgggactacaggtgcccgccaccacgcctggctaattttgtatttttagtagagatggggtttcaccgtgttagccaggatggtctcgatctcctgacctcgtgatccacccgcctcggcctcccaaagtgctgggattacaggcgtgagccaccgctcccggcctaattcttttttgagatggagtttcgctcttgttgcccaggctggagtgcagtggtgcgatctcggcttactgcagccccccacctcccagttcaagcgattatcccgcctcagcctcctgagtgcaccaccacgcccggctaatgttttgtatttttagtagagacagggttttgccatgttagccaggctggtctcgaacttctggactcgggtgatttgcccacctcggcctcccgaagtgcttgggattacaggcatgagccaccgggcccggcctatccttgaggttttatgatctgcctgtcacttggactgtcactgccttcctacacgtcagcccttaccaaatcctcccatctactttccttcagtatctggctacctaccactctcttcagactgacatttctaatttgtctcctccctgacttggtgtcaccaagaactcaaatccctattgggactcaggtggtcttgtagctgccctttgcccccaggatctgaaaaaaacagccctgcagactgaagccggaaaacttgatataaacttgaaagaactcagaaccacaacagattctccaggggcagcctttgtgcctggagctgctgctacacaggccgcccaggaagacccccctccagctcctgcatgccgcatgctctctccagaaagtaaccacaactgggataccaatgcctatgccatcatcacagacttcacaccacacaccaggaagtccctgagtgcccctgctggccttgttagggcccaacggccagaaacctcaactgctgccctgtaggctcaaaaactgggtttatcaacagctccattcatctttgtttttatttctttctttctttttatttttttattttattattattttttttttttaaagataggggctctctgttgctcaggctggagtatagaggcaagatcatggctcatggcagcctccacctcccaggctcaaacgatcttttcacctcagcctcccaagcagctggaactataggcccatgccaccacgccgggctaatttttaaattttttgtagagatggggtctttatgttgcccaggcttgtttcaaactcctggcctcaagtgatcctcctcggcctccaaaagtgctgggattacagacatgagccactgtgcctggcctgttatttttgtttcctcattaaatgcttgactgcttgcatcatccagcaaaaatcctttgctaccaagtctcaacagatggtcccgctggtagtttatgaacacaacacagaacagaaaatggacggggactgttgagaggaaagaagcaggtctctgctcttcttgcacagggggagtgctgacaaagaccctccctccccacactccagccaggctccttagagtccccttctccactgggcctcaccctggcctatctaggctggaacgaacactaacatagctcctaacagctcaaggccacattcccagaacgatcctagccccctctaaagtgcctgcctgagaagttcaaggctgccacaagaatttcctgtgtgttccagccaacacctgaggatggggcccctgtctcccagtctctgtgggaggttgggggcctgacttcggtaagccccagtggcaaacccagatcagttggtttcacaggggccaaccctcccttcccagttttggtgattttctgtttccctaactctactgagtccccaccccttcccactccctcactctccctttaaactccaggcacatctagacaaatcagcatggagccagctttttctcatgttgtcagtagttaccaagtaaaatctgttttttctgcattaactagtgtctcactgggctctgcagggcagctcctacggtccctcaggcttggagggtcactttaaacaataaaaagcaacaggacacaaaaatccctggctggaaaaatccaaaaagcaggtctgttagcagggcaggcccggagtgacttcccctttctctaacattcccacgtggtcctgcacaccacacatccccccgaccctggggagtcctgggccccttcctggtggagcagcctctctcttgcagggaaaggccctggggtaccccaaggcctccaacagggagcctgttggagaagtcaccaaggccctctgagtctggggctccacagaccctcccccaggcctcctgcaactctccagctctgagagtctgatcccagcccaaggaccaagtgggaccctcccctgtgactctaccacaccctcaccaggtcaagccctactccagggagaggcttatcctcctggtctggacccccaacccagtcttgaagcgggatctctcaccgctatctggagcccctcatcacagcacagatcttcaacctcagctttccacaaggagtctggggaccccaccccggtccaaagatccccacccaaggtccgaattccccagttcccatccagattccccaccccaagtccggagactcccacccaacgtcagatcacttcacagcggtccgaattccccacaccctatcccagtgttccaccctaggtctgaaggcccccgccccgaatccggccgcattcggccccggtctagccascgctctcacctctcccgcgacggcccgcccgggactggacccgccccggtccggcgcaggcagcgcggcgggcagccctagctgccccagaagccscacgacgatggcggcaatggcggtggcgctgcggggattaggagggcgcttccggtggcggacgcaggccgtggcgggcggggtgcggggcgcggcgcggggcgcagcaggtaggatggggtcggggcgtccccgcggtaggtgtccgcgcggccggggtgtcctcgtgagggtgtccgcgcggcggtggccagggtgtccccgtgggggtgcccacgcgggggtgtccacataccggcctcttggtctagtcttgctcaggagtccgggctgcttctagccacaagtagcccccttcccaggtggggaaactggggctgggtgccttgtctaaggtcctgctgtgctgactgcacctgtggtctcccagagctggtatcccagtaacaactacagttctgaagatgatgatatcccacctcccgaggtcaccaggcaccggccccactrgccagacttcccaacttctccccagacccctagactctagaggttagaggctgcacagagcaatgggaggatacacaytcgtcctcctggagcccctgaagaacagttaactaaatcaggacaataatcataactgagcactcgaagcagaggctgggtgtctggtcactcaggacagttcaagcctcatcctgtaggacagactcccctagatccgaccagagcgccaccatatctgttatgtgtggccagtttcattccatgcacgacaacatggtcccccaccatgcagggggcccctcgacccagccccctggatgcttgtgacagcgagcagctctccccacaggcagtgagtgtagaggggtgtaaggacggggtcagggctccttcccagggatggcggctatgggaggcatggtggctggccctctgcccgcggtggactcgggagggagggctgactgtgtgtgtgaatgggcagagttggtgctatggaggttttgggggtctccaggacggagggtggcccaacagagttctgggaggcagtcaccacctcgtggccttgctgagacctggaaccctcagccagggcactccatctttcaaagcttcttggctgcatgcgtcaggtgggcaagctcaggaaggttaaatgcacccgtgctggcggagtcccataaaaggggattcggcatcaaaaggaggaaaaaggttcaaagggcatttatcatggggttcagaatcacggatgtgaggggcggtagtggggacaacagacagaaaagyttccccttcccatactcacagtccagacacggcaatagccaaattccaaatttctaggtattctggactyagaatggggaatatcatacgagacttagggggataatgcccttatcttcctattttaagggaaagaacaaactgaaccttctatgcaaaataggatgatgatcctggtcctcccagtaagaaataaaataagtagtctccaggcattcctttccgccagaggagcaactgttttttaaatagccctttcgtgcccagtctgttactaaaccatatgagttgtttttttggggtttttttttttttttttttttttgagacagtgtcttgctctgtcgcccaagctggagtacagtggtgcgatctcagctcactgcaagctccgcctcccgggttcacgccattctcctgcctcagcctcccgagtagctgggactacaggcatctgccaccacgcctggctaattttttttgtatttttagtagagacgggatttcactgtattagccaggatggtctcaatctcctgacctcatgatccacctgccttggcctcccaaagtgctgggattacaggcatgagccactgcgcccagccgagtcattttttaatactactgcatgtgagttaacacaatcattcccaaattgaagttttagatgggccctcaaaatttttaggatatggttttcctacaggtttatattgaaagtatggggtatctcctattactcctctttttatttgtcttaaaggagaaagggagaggccagagaccaaatgtccccatttccctatagctaatctctctggaagacaagcagcccagacttgagcttctagatggatacaaccaggtgcatgtccaaggcacagaggagggtatttataacccatagtaacattaaatgcagtgccttctcctggctgagcggkgcaacggtcatctgtagttccaggcatccacacactatcgttagtatagatttctgcaggagcatccatccaggtgagaggtcgaataagtggaggaaaaggcacataagcccaataagaataattttgtgtagcaggtaaatcagtttaaggggaaactggtgagacagaaagtgtaaggaagataattattaaataaaacctattgtaagtgagatccagtgctgaaggaggaagagaagaacagagggatgttattttcaggctaatagaaatggtgagatttttaggttcgtaaggagaaaaagataattaggagaagtgggattagttagaggggtttacattgccattagggaggattgaaccagacccattttgatttggcatgccagtttctgaggagtcggtacagatctcatcaggtatgagggcagtctctgacgcgaacgtctcttcctcgtggtttttattgtcagtattcacacgaagtttaagtctcctagtgggcacccagacgggattgacgatctcctggtaaaacacaagcataccctcttccccacgttataattgttccaggttcccaggtattggtttgggagtttttccatgacactggcttgccttcgtttagggagaattttttgcctgtataatggcatttagctgcagtcagagtattgtttttaggaacatttagaaagcttaaacaatgctaaatataattgggagtggggagtagttaaattatgcttttaaaccagccttgtcttcttttacagtaacttgaagaggtttagtaattttttcaygttttggaccgagaccgagtctggaaacaaaccccatgttttccattatatgttgactgggagcactgtaaaagttatgtggaatattaatttcagccccaatttgtgccagcaaatctctgccccgaagattaatggggatgggcatgatataaggctgaattgttcccttttgaccatcagggccagtgcaagccaagataaatgtgctctggtgaacttcttcagcttttctaacaccttctagtttcatgttagtgggatgtttaagccaggaggaaggccataaattagaggaaataatagaaacatcagccccagtatcarctaggccctcaaccttttttccttgaatgtgtatggtgcaggtaggccattgtttagaaattacattaatccaataagcggctttttcaccgctggagcccatcccagggccccatgtcttatctcctttgtttaaaacaatgttaggtagtaaaagtaattgagcaattgactcactggccggaatggaaacaggaactttggcagacaccataagtttacataagtttaatctcatcagaggaatcagaattaatgagactagtatgaactatgatacctttagtatcatgaggtggatgccctgcctaacaccaggcccaccgaaccttgaggtaaagggccagtgacccccatggggacaattaaaggcaaagaattaggtagtaaatttagaggaatggtactacagagatcgaccgccctgctgcctactgtggaggtagacaagcattgtactgagacagaagaagaggctgggacccatctggattggctgtaggtaaatttgtttgtgctgggggctgcgttgggactgcttgacgcaaaaacacaacattggtctgagtccgaggtgtcccatttgataytggggcctgggactggccttgcttcctgtttccctggttctgtggcaagggattttcatctatatcagactgagtggcaagtacttgcccaatgtttacccttacgacaacgcaggcaaacagtagcaggagcatttggccgtgtttgttgagccggcttggccgcttttaagtttttaacagtgtagtttttttgggtatgaccaagttggccacaattatagcaggctccaagaaaagaatcagtcgagccagtttggttgccgtgcttcatggccggtgcccacagaatagctctgtgggtctccgatccaacgccttcacaagctttaatatatgcaggcaacacctcatgatcaggtaaattttgacgtaggatggaatgcacggccattttacactcatggttcgcattttgaaaagctaacatatgaagaagaataccttgagtgtgctcatcagagacagatttttcaacagcatcttgtaatttagctaaaaaatcaagatataattcattgtgaccctgtttaacaatagtaaaagaaacagaagcttggcctggggtgcgtaatttatcccaagctctcatacacacctttgttacttgttccgtggtgagagcatcaaagcctaaatgagcagtagtatcagagtaattatcggagcctgtgagctgagcctgagtaattggaatgccatcagcccgatttagctgagcctgcaggcgggcctcctctgaccaccaggtatggaattgtaaatgctgagatggagttagaacagcttttgccaaaaggtcgcagtctataggaagcaaaatgacctcggtacraagagtctgtaataccgttttaacatatggagaagtaggamcatactgagtacaagcatccttgaattcttttaaaaaggtaagattgagcggcgtatatcgacacacttgtaccccttgagcattaggaggttccagcatgaccgaataagcccacgcctctaatctacttgtttgttttggcgtaataagcattgcatgaaagtttcaagagcaggcacatgagatagagtcggcatagaagtgacaggaaaagtatgtatagataagagaaactgagattgacggggtcggactggtataagagtgtgagaaaggggcattgggggagcagaagaggcagaagcatactggtgattactggcccagtcctgcacaaccagagtggcaggggtgtccctgcatgaagaagggtacagagaagcaggttgagtggatggcaaagtgaccggttgagggaccaaaatgataggagggtgaggggctgtggtggatgggggagggcctgcagaattacaggtaaattgtagtttggatggctccggaggcaaagactgtaaaggtttggagagggaagagttagcatagatatggtcctgggctgtctgagttggggccgcaggagctacaagtgtcggctcttcgtgaaaagaaataagatcatcagggggtgatgttaagccaaagtcactggagttagatattgaatcctcagtatcgtcaggtgggggaggagtaggcaaagggaggggctgagcagataatgaaggccgagtgggagaggaaagctgaggaagaggtagagggtggccagattcagaaaactgtggtaactgcagggtgtcacgggattggtatgtcattaggatggcacgtaccaaggcccaatcaccccaaacagtgacaggaacataatttcctgttgggaccagttctcggaattttgcaccaacatgatcccatagttccacatctaacgttcccttttcaggaaaccaaggacagtgttcttccactgccctgaatagggtgaccatattttccatgggaacccgaactcccccattttaacaggaatttaatatagcagagataagcataatgtttagactctgcgtgacccatagttaccccggasaatacacagacaactcaccaatcgtyggggagccraacaagcatttctgtggactggaccgatgaacatttctccgcacctaccaaagggaatcgggttcccacatgcacttaggaaaaagaaaaccacgttgggcgccagatattgggggaacctgcccctaatatttcaacgtacgttctttctattttctgtaagtgtcagccggctgagaaatgaagagaaagagtacaaagaggaattttacagctgggctgctgggggtgacatcacgtatcggtaggaccrtgatgcccacctgagccgcaaaaccagcaagtttttattaaggattttaaaaggggaggggttgtgccaatagggagtaggtcacaaagatcacatgcttcaaagggcaaaaggcagagcaaagatcacatgcttctgaggaaacaggacaagggcaaaatcagaactcctgataagggtctatgttcagctgtgcacatattgtcttgataaacatcttaaacaacggaaaacatggtttaagagcagagaaccagtctgaccacaaatttaccaggacggagttttttccccaccctaataagcctgagggtactgcaggagaccagggcgtatttcagtccttatctcaaccgcataagacagacactcccagagtggccgtttacagacctccccccaggaatgcattccttttccagggtcttaatagtaatattccttgctaggaaaagaatttagcgatatctctcctacttgcacgtccatttataagctctctgcaagaagaaaaatatggctctttttgcctgaccccacaggcagtcagaccttatggttgtcttcgttccctaaaaatcactgttattctgttctttttcaaggtgcrctgatttcatattgttcaaacacacgttttacaatcaatttctacagttaacacaattatcacagtggtcctgaggtgatgtatattatcagcttaygaagataacaggattaagagataaagacaggcataagaaattataaaagtattacttgggggcccaggcgcggtggctcatgcctgtaatcctagcactttgagaggccgaggcagccatatcacaaggtgaggagatcaagaccatcctggctaacatggtgaaaccctgtctctcctgaaagtacaaaaaattagccaggtgtggtggcgggtgcctgtagtcccagctactcaggaggctgagacaggagaatggtgtgaacccaggaggcggagcttgcagtgagctgagattgtgccactgcaccccagcctgggcgacagagagagaatctgcctcaaaaaaaaaaaaaagaaaaaagtataaaagtattacttgggaattgataaatgttcatattgaaatgaaatcttcactatttatgttcctctgccacggctccagccagtccctccattcggggtycctgacttcctgcaacacaggtgtgagccactgtacccagactaggggtgcagtttttttttttttttttttctgagacagagtctcactctgttaaccaggctggagtgcagtggtgctatcatagctcactgcagccttgaactcctgggytcaactcaccctccagcctcagcctccctagtagctgggactgtgggccctgcagtttctccttttagagtaggaagacctgaactgtcccaggcttggagtgggtgggcgatgcagcccctgaacaggagccagaatgacaacacctgctgccaggaaagagctctagatagagcagccatacaggagggcccctgaggtggcaccctgaggtggccagcctgcctgtgggtgcacattttgggggacccttccacttgccctcactggtgcagtgctgcattctcttgggccttgctatgagctctgggctcctgctctttgctggcctgtaccaggcagtgggttcaaagaggagcagaaaattaatggacaatatgtcagaaggcagaggcaagacagacacttgctggggccaagccctgcaggtggagagggtatgcctggctaaagtgggtgaaaggcaaggttatgaggttctccaggacactggagtgcacaggtggtgtgtccccaggtaacgcctgccacccagcccttcctcccacagaacagcatctgccctacccacctttgaggtactttggggtccttccttcccagcaggctacccaagcccttccaagtgcttaaaggcagatttcctatgcttgcaaacgactgccctatgccagtgtttatcagcccgagagggctcctgggtgtgcacagggggcgagcaagctgcccaagataagcacatccatacagacagctgctcaccctgcctgatagcagacagagggggcacagtgcgaggctgcagggcaggatgacctaacragggccctgctatggcaacaagaaggacaggcacctgccatggaaggtagggaygttctgagcaaagcttccggctaccaggcagctggaggagagagatgcttctccatcagcaggttcatgctccccgggggacctggtggcattttctccctgaccagcagtccttggttctctagacttatattaaagccattagaataatttacaacaatttaggcctttccagagcccttgagttgaattaggaattgagtgtgctttggactggctgttggaaccgagttgtggctctgtcagttcccgcaggtgcgcacacatctcacgtgcactcagaggctggctgccaggtgaaasagtgggtgggtttggttgtggggcaggctcgctgcaggccatggcctgagtgcctggatgcagcttcccaagctttctcagctgtgagccagggctcctctaggctccagctcttgtatcctttaggagtgcatgttctagacctgtctgtggggcatctgcagggccagggtgtggagagacatgacactccaagtacactctctgcagccttgcctgcctaggaaggtggaggtggctgcaaagataagtgcagccttctcatggcagacgctaggctctgatgsaggtgttgggcaggttgcccagccttgtatgacagaccctgctctgatcatggaacctcttggccttgtctgaagcagcgaccggctccagatgctctgggagggtggtgcttctcatctgggcaggctcgtgtctgcagaggggctgagggcactacttgttttataccctagagtcttgtcatcagtccccaccctgccctcaccccagcagactgatgacttgctattatttcttccttccttcagcagggagttggctggtgcctggtgctgggtgtcccggacctcaggcccagttcagtgtacttcccctctctacttcctccctccagtcccttctccatccctcccttttttggctgccccttgcctgccttcctcgccagtagcttgcagagtagacacgatgacaccttttgcaggctaaaaaggctgagagtggcactatgtgcagtgagccaccatggaggaccaaggtgaggcgacaccacaaccagcccaaaaggaattccagggatgaaacctgagcccaggcagctctccctgtgcccagggtggcttccctcctagctgactgcagctgggcacaccaagaccctggctgtgtgcactggccagctgtgagggacaggggctgcttgtgcttttattcttttttttttttttttttttgagacggagtctcactctgtcgcccaggctggagtgcagtggcgtggtatccgctcactgcaagctccgcctcctgggttcacgccattctcctgcctcagcctcccgagtagctgggactacaggcgcccaccaccatgcccggctaatttttttgtatttttagtagagacggggtttcactgtgttagccaggatggtctcgatctcctaaccttgtgatccacccgccttggcctccaaaagtgctgggattacaggcgtgagctaccgcccctggcctgtgcttttattcttgctcacttgtgacggagggcagccttcacaactgaaaggcacgtggacttgagaatgttttagtccaccttggtggctcatgcttgtaattctagcaccttgggaggccaaggtggaaggattgcttgaggccaggtgtttgagaccagcctgsgcaacatagccagaccccatctctacaaaacaaaaaaatttagctggacgtggtgatcggtgcttgtagtcccagctattctggaggctgaggctagaggatcacttgagcccaagaggtagaggctgcagtgagctgtgattgtgccactgtgcccctgtcgtgggggcccttccgggtctatgtcccagccctgtgctgaccgtgttccttctcacctttcatccctcccccaagcagggcagtggactacaatcttctgggtgacagagtgagatcctgtctcaaaaataaatagaataaaaaagaaaatatcttagttctgtgtctggctgagaacactgggtgaggtttgagttcagagtggttggtatggtgtgcgtgtgatttgcaaagatgatcacacacgcccacggccaacctcaccaccatatggcttggtctctggatttgcacagactatgtgtatcgagtcactctttctgctctgttgtgtggtgtcttgtcacccctgaccatcacagaatggagtgtccaatcctgataaaattgatcctgtaccacgtttaaccagacagacagtccgtcccacctctcatcccttctctcagcaggtcagcgggactatgatctcctggtggtcggcgggggatctggtggcctggcttgtgccaaggagggtatgtattctgtatacttcgtggcaaggcctcgaagcttttagggcccctagagagggtggtgctgtccagaaaacgtccatgagcaaaatgcgttgcctccctgctggggtcaccccagtggcctctgtgttgtggcttgttccctgccactctccagctgtctgctgtacccagcggccgccgtggcacttcatggctgaactgccttcctcagctccagccctccagctcttctgctttactcacagtgacagccccaatccgactagtctcagctcccaccactcacaccctccgtgggctccccactttccttcaygtgcttctggacagtcctctccttcaccttactgtggctgtcaccctgcctgcctgctctctgcccctgcccggctagctgcgaggctggagctgcaccctcctgcttgtccctgtccttgttcttagtgctggtgccttcccccagggtccatggtcagttctgctgggtgagtcttgtacttggcctggcacccattgagtaaagatgttgggcgaacgggctggacccagaggtgtccagagatgacactttgcagttctctgctaacccacgtgatgcacaggccaccagcactttgccagactctgtgccctgctgtaggagttcctggtctgctctggccatgtctacacaatgataagagggcagttrtggtgaatggggagggaaggggatgagagggaggtggggctgaaatgagagggagttaactgggcactttggccctgaagctgtgcttctctgatgtccagtattgggctctagaagcatacatggtgtaaaagaaatccactactcttgctctgtgggggccggggagtgtgtaggaacctgggaagtctcctggcctattggggatccgcagaggcacccaggatcagtgccacactgtactctcagaaccactcccagaaacgatggcgcaggcagccacgaggcctagtgctgttccttttagcagaccgggcacctgggctgtgcgttcactcccatgctgggagtgaccagctgcagagacctgagtcccctttaatccggaatgtggacagctcctgggtatgtctccgcctttcatgagagtggcatttccctgcagaggatgacgtggttttgtggcttttttgagatgaactgtacctatcaaaatgggcaacctgatcattcttatgtgtgcatgtgtccatgcagccagtaccgcagtcaagattggcgagtgtgtcctccaccccgttagtctgccagggctgccgtaataaacagactgccataacagactgggcggctgaaacaacacatgcttattgtctctcagttctggaggctagaaatcatccaggtgcgggcagggctgatttcttctgaggcctctccgttgggctgtagatggcagttgtcgtccctctgtgcatgtctatgtcctaatctctacctgtacctgtcctaatggatcaggtggatgccctcttattttgttggctttttattggagacagggtcttgttctgcctcccaggctggagtgcagtggcgtgatctcagctcactgcaacctcaaactcctgggttcaagccatcctcctgccttagcctcccaaaatgctattacaagtgtggccactgtacctgtatatggcctaatttttttttttttttttttgagatggagtctcgctctgttgcccaggctggagtgcagtggtgtgatctcagctcactgcaacctctgcctcccgggttcacgccattctcctgtctcagcctcccgagtagctgggactacaggcgcccaccaccacgccyggctaattttttttatttttagtagagacggggtttcactgtgttaaccaggatggtctcaatctcctgacctcatgatccacccacctcggcctcccaaagtgctgggattacaggcgtgagccaccgcgcccggcctatggcctcattttaacttaactacctcttttttttttttgcaagcgagtcttgctttgtcacccaggctggagtgcagtggtgagatcttggctcactgcaacctgtgccttctgggttcaagcgattctcctgccacagcctcctgagtagctaggattacaggcgcctgccaccacacctggctaatttttgtattttagtagagacggggtttcaccatgtttgtcaagctggtctcgaacttctggcctcaagggatccgcctgcctcggcctcccaaagttctgggattacaggcatgagtcaccgtgtccagccaacttaattacctttttgaagaccctatctctaaatacagtcacattctgaagtgctagggtttagggcttccacatagggattttgaggggatatggctcagcccataacaccccaacattttctgaaaccttggcagttccttccggcttcccccacttctgcatcctaggcaaccaggcatgtgctgtctgtcactatagtttgcattttctataattgcgtataaacggaatgctgctgtatgtcatcttcctcttctggcttctttcactcagggtaatgaccttgagactcatcttcgttggtgcgagtgtcgatggtttcttgcttttcattgctgagtagtgttctgtttatggctgtgccgtttcgtgtacgtgttcccctgtagctggacacttgaattgtttccaccttttggccattgtggacagtattgctgtgaacgtctgtctgtgtgtttgtgtggatatatgttttaaattattttgggtaagtgcctaaaaatggaccaactggatcgtgtggtatatctcttatttaggtattttttcatttcttttarcagcattttgtagtttcttttttactcaagtttttttttttattaaaaaaaagaaagatgagggtctctctgtgttgcccaggctggtctcaaaatcctgggctcaaatgatcctcccaccttggcctcccaaaacgttgggattacaggaatgagccacggtgcctggcctgtggttttcaatgtctacgtctttcacatattttatcagatacatccctaagtgtttcatatttttagaatagttttattgagatatacctcacattacgtatgcatttgtcccttggtacccgaggacgactgggttcaggaactcccgctgttagcagaatccatggacactgaaattygtgcatactggagtcaggcagttggccctgaagcacccacagatacagagtcagccctctgtatatatagttttgcatcctatgaatactgtttttttctttttctttcttttctttctttctttcttttctttttttttttttttttttgagacaaggtctcatgtgttgcccaggctgcagtaaatggtgcaatctcggctcactgcaacctccacctcccgggttcaagcgattttcccacctcagcctcccgagtggctgggaccacaggcgccaccatgcccagctactttttgtatttttttggtggagaaggtgggtttcgctatgttgcccaggctggtgttgaattcctgagctcaagtgatccgtctgcctcagcctcccaaagtgctggattacaggcatgagccaccatgtccagtggagtactgtatttccaatccgagtttggttacagatttggaacttgctgatatggagagataatatatatatttttttgagaccgagtttcgctcttgtcacccaggctggagtgcaatggcacaatctcagctcactgcactctccacctcctggattcaagcagttctcttgcctcagcctcccgagtagctgggattacaggtgcctgccaccacgcccagctaatttttgtatttttagtagagacggggtttcaccatgttggccaggctggtctcgaactcctgacctcaggtgatccgcccaccttggccttccaaagtgttgggattacaggtgggagccactgtgcccggtcaagggattatatttattgaaaaaaaatccatgtatgagtggacctgtgcagttcaaacctgtgttattcaagaacattttagtttctccccaaaataccctgtacccattggcagtcagtctcttcccccctctccccagcccctggcaaccactaatctacttcctatatccgtggatgtgtctgttctggacatttcagctgttttttggttggttggttgtttgttttcagacagggtctgactctgttgcccaggctggggtgcagtggcaccatctcggctcactgcaacctcsgcctctcgggctcaagcaattctcccacctcagcctcccgagtagctgggattacaggtgtgcaccaccacatccagctaattttttgtatttttagtagagacggggtttcaccatactggccaggctggtcttgaactcttgacctctcaagtgttccacccaccttggcctcccaaagggttgggattaacaggtgtgagccgccgttgttttgttttttgagatggagtctcgctctgtcaccctgactggagtgcagtggtgtgatcttggctcactgcaacctgtgcctcctgggctcaaatgattctcctgcctcagcctcccgagtagctgggaccacaggcacacaccactatacccgactaatttttgtacttttagtagagatggggtttcaccatgttggccaggctggtcttgaactcttgacctcaggtgatccgcccacctcggcctcccagagtgccggtattacaggcatgagccactgtgcctggcctctttgcattttctttttctttttctttctttttttttttttttgagacggagtttcgctcttgttgcccaggctggagtaccatggcacaatctcggctcaccgcaacctccgcctcccaggttcaagcaattctcctgcctcagcctcctgagtagctgggattacaggcatgcaccaccacgcctggctaattttgtatttttagtagagaaagggtttctccatgttgaggctggtctcgaactcctgacctcaggtgatccacccgcctcggcctcccaaagtgctgggattacaggcgtgagccaccatgcctggccccccgctttttttttttttcagtactttaaaaattttgcccctctgacttctggcttgcattgtttccagtgagaaatctgctactatttttatcttagtgtctctgtagtgtgtcttggttgcttttaggattttctcttttcattggccttgagtccctccttcttcccctcacatgtggggacttttaattccatgtatattaggctgcatgaagcttccccacaacctactgatgctcttttcattagaaacatttcttactctgcgtttcattttggatagtttctattcctatgttttcaaacccaccaataaaagattctgcaacatctgacctgccattaatcccgtccagtgtatttttcatctcctgtattgtagttttcatctctacaatccagcttgagcctttggttatatcttccatgttgctcctgcactgtttgaacatgcagaatggctagtggggcagtgagctgaggagaagggacagaggggaagctcggctgttgggtctacgggtatgatggagaccatgcagctgaaagtaaaccgtcaccccttctgcttcagtgtgaaaggccaggtgaagatgctgcagctgatgaggctgggccttagggtgcggggggtggtggaatctgcttgtgggcgggagatgtggctatgtggctataaaggatgaagaygaacgccctgtttgcttttcagcctcgcttggatcaaggttaaaaggccggttgtggccttcttggtggaagaaagagagagataaggcactgtcctccccttcrgagggtctggggatacactaatccatcaaaaccactgagggctgggcgttggtgtgtgcctgtggtcccagcactttgggaggctgagctgggaggattgcttgagtccaggaggtcaaggcgtaagcaagctgtgatcrcaccgctgcacaccagtgcctgggcaacaaagtgagactctgtctctttaaaagaaaaaagaaaaaaaagcctttttttaaattaaaaaaaaaatcaagtctacctgaatggcctgcagttggacccacaaaccaggtacccaagttaccaggcaaggcagctgcagttgtaccagtcagaagtccacaagatttgaaaaaaaaaaaaaaaaaaaaaagcctcaggggtttcagtgaatgctgtgttaacttttttttttgagacatagtttcactcttgttgcccaggcttgagtgcagtggtgccatctcggctcactgcaacctctgcctcccgggttcaagcagttcttctgcctcagcctcccgagtagctgggattacaggcgcccaccaccacacctggctaattttgtatttttagtagagacgagctttcactactggtcgtgaaactacagttggtcaggctggtctcgaactcctgacctcaggtgatctgcccgcctcggcctcccaaaatgctgggattacaggcgtcagttaccacgcccagtctgcttgttaacttctataagtcagatgtttgatgtgaccgagttcaaggctgatacagcccagagccaggacaggtcgagagctgcccatttttagggcctcagacttcctactgggagcatcgcagccccttctgaacagaggtttggagaaggtgggtcatttggagagaagtgacctaaactatcctagttgaaggaatctatccttgaaagtcatcattgaaggaattcaaaaagagaaaacttaagggaaaggaaaaaaayagttttaaattttaaagagtgggcatgtgggagagggggtggagatagttaagagttataggaaaacatttccaattaatatgaggagaaattttatattgggagagttcccaaaattaaatggccacttgggaaggcaatacattcccagacaaaggcaccaggcataggtgaacacttggtgaggatgttatgaaggagactcaaacttcaggtaagcaggtagaacaaattgcatataatatccttcctggccgggcatggtggctcacgcctgtaatcccagcactttgggaggccgaggtgggcggatcatgagatcaggagtttaagaccagcctgaccaacatggtgaaaccccatctctactaaaaatacaaaaaaattggccgggcatggtggtgcgcacctgtaatcccagctattcaggaggcttaggcaggagaatcgcttgaacccaggaggtggaggttgcagtgagccaagatcacgccactgcactccagcctgggtgacagagctagactccatctcaaaaaaagagaaaaaaagatccttcccacaccaaaagtctgtagctgtgaaaagtagctaccatatagtgcaagttgagatgcataagaggtttataaaaccaccctggagtcgaaggagagagaacttttggtagggagtaagtaggtaaaaagggacccaaaggtctgggatcttgaacactgaaggaggaacagtgttctgtgagaaaggtttgtttttaacatgttaatttcttcaacaaaccattygaatacttaatgtggtccaagctctgggccaggacccggaacaacaaagacaaaccaggaccaaagcccctgactgacggagttctgcagtttagttaccgagacagacacatgaacagatagttcatcatatgtgataaggtggagttagggcacacaagtgaggcatctaagcaaggaaataaaaataaaaaagtatggaatagttagaatacctgttttattgatcttttctgctaattctgacatctgtgtctgttccaagtcagtctccattgactgatttttttttgtcccctttataggtgtattttcctgcttctttgtgtgactggtaatttttggttgaatgccagacacttgaatttaccttgttgggttctgggcatttttgtatttctagaaatactattattgagctctgttctgggatgcagttattaagagtcagtttgatccttttgggtcttctgcaaaagatttgttaggtgggtatggagcagtgcccagtctagggctaatgattctcaactactggggcatgacccaaygccccaggaattatatgcttttcccagtccagattctgggaacaggcactgtcccctgccctgtgtgggctctgtcccctccagtccttccaggtggttctgtctggtctcaggtagtttcccaagacacatgcgccgatsagatctctcagattctctgggcagccccctcctcactgtcttctgtgcatgacctctggctgcctcagtctcccccagttctcagccctctcctgtgctggattctccccatcttccccagcctgcagtgctgggtcctggagactccccagggctcaccatgtttgtttcctctctctcaggtcctttgttacctgacatggagtacctgaaagcccgttgtttcatgcattttacctgggttttgggttgcttcagggggagggtaaatctgggccctgctgctccatcgtggtcagatgtgggagttacacactggcacactggctttttttttttttttttttgagacagggtcttgctctgtcacctaggctggagtgcagtggcacaatcttgactcactgcaacctccacctgctaagctcaagccatccccccaccttagcctcccgagcagctgggaccacaggcgcatgccaccacacccagctaatttttgtattttttgtagagacagggttttgctatattgcccaggctggtctcaaactcctgggctcaagcaatctgcctgctgcggcctcccaaagtgttgagattataggcgtgagccactgtgccttgtggacattagcttttttttttttttttttgagacagagtctcgctctgtcacccagtctggagtacagtggcacaatctcggctcactgcaagctccgcttcctgggttcacaccgttctcccgcctcagcctcccgagtaactgggactataggcacctgccaccacgcccaactaattttgtttttgtattttttagtagagacagggtttcaccgtgttagccaggatgttctcgatctcctgccctcgtgatctgcccaccttggcctcccaaagtgctgggattacaggcatgagccgctgcacccagccaagcaaaatggattttaaaaatgaactcttacaaaactttgttctaatcttgctttctaatagccacgaatcaaacactttccttggcattttagggttcatgagatttgtgtgtgccttgggargcagtcaagtccaaggcctgaagtttgctgatgcagtgcccaagcccgggcaaatggaagcttgaaattagccctrgctaatgtttttttttctttctttctttcttttttgagacagagtcttgctctgtcgcccaggctggagtacagtggtgtgatctctgctcactgcagcctctgcctcttgggctcagacgattctcttgcctcagcctcccgggtagctggggctacaggcttgcaccaccacacctggccaattttttaatttttatttttagtggagacacgttttaccatgttggccaggctggtcttgaactcctgaccacaagtgatacaccttcctcagcctcccaaagtgctgggataacaggtgtgagccaccatgcccggtcctggctaatggtttctgagttggccccagaacctgtggccctgggtggccacactgctggctgggagggcaactgggtggctctgcagcgggaagtgtggtttggagtcaggtctcggctcctgctctggggctggtccaccctggggctgctgcgtcacttctcctgagctttggtgtcctggtcctgagagtgaggcagcgaatgcccacctagggggctctggctgggatgggaaggggcaagggagagcctctgagtcaggagccattcccggtgagtggctacctgggggatgccacccagggatgcttgggtgggcactgggcttatggtgaacgtgaacatgcaggggcaggtggggctgatgccagcactgtgaggggtggatggtacaaaggctgcgggccctgagaggtctgagggctcctgcctgtgggcagcgcagctgggtgggcagtgccagaaagagrctggaagactcaatgcagagccagcaggcagcgcagctcagcaggcragagcgcagaggcagtcaggggtccctagcattgcgnnnnnnnnnnnnnnnnnnnnnnnnnnnnnnnnnnnnnnnnnnnnnnnnnnnnnnnnnnnnnnnnnnnnnnnnnnnnnnnnnnnnnnnnnnnnnnnnnnnnnnnnnnnnnnnnnnnnnnnnnnnnnnnnnnnnnnnnnnnnnnnnnnnnnnnnnnnnnnnnnnnnnnnnnnnnnnnnnnnnnnnnnnnnnnnnnnnnnnnnnnnnnnnnnnnnnnnnnnnnnnnnnnnnnnnnnnnnnnnnnnnnnnnnnnnnnnnnnnnnnnnnnnnnnnnnnnnnnnnnnnnnnnnnnnnnnnnnnnnnnnnnnnnnnnnnnnnnnnnnnnnnnnnnnnnnnnnnnnnnnnnnnnnnnnnnnnnnnnnnnnnnnnnnnnnnnnnnnnnnnnnnnnnnnnnnnnnnnnnnnnnnnnnnnnnnnnnnnnnnnnnnnnnnnnnnnnnnnnnnnnnnnnnnnnnnnnnnnnnnnnnnnnnnnnnnnnnnnnnnnnnnnnnnnnnnnnnnnnnnnnnnnnnnnnnnnnnnnnnnnnnnnnnnnnnnnnnnnnnnnnnnnnnnnnnnnnnnnnnnnnnnnnnnnnnnnnnnnnnnnnnnnnnnnnnnnnnnnnnnnnnnnnnnnnnnnnnnnnnnnnnnnnnnnnnnnnnnnnnnnnnnnnnnnnnnnnnnnnnnnnnnnnnnnnnnnnnnnnnnnnnnnnnnnnnnnnnnnnnnnnnnnnnnnnnnnnnnnnnnnnnnnnnnnnnnnnnnnnnnnnnnnnnnnnnnnnnnnnnnnnnnnnnnnnnnnnnnnnnnnnnnnnnnnnnnnnnnnnnnnnnnnnnnnnnnnnnnnnnnnnnnnnnnnnnnnnnnnnnnnnnnnnnnnnnnnnnnnnnnnnnnnnnnnnnnnnnnnnnnnnnnnnnnnnnnnnnnnnnnnnnnnnnnnnnnnnnnnnnnnnnnnnnnnnnnnnnnnnnnnnnnnnnnnnnnnnnnnnnnnnnaggcgggcggatcacctgaggttgggagttcaagaccagcctgaccaacatggagaaatcccatctctactcaaaatacaaaattagccgggcatggtggcgcatgcctataatcccaggtactcgggaggctgaggcaggagaatagcttgaacccgggaggcggaggttggggtgaaccaggatcgcgccattgcactccagcctgggtaacaagagcaaaactccatctcaaataaataaattaataaatattaaaaagtaaaaacaactgtttttattttcgagtacagttatagayagcagattcgtgtggcatgtcagctggtctgtgttagagttacaaagcaactttaaggaattccaaacactctagaagaacagggaagcctccagcagtcacctgaacataaattcaaatgtgctcttcccacgtcccaggcacccggtggggcctyggcggcacctgcgtcaacgtgggctgcatccccaagaagctgatgcaccaggcggcactgctgggaggcctgatccaagatgcccccaactatggctgggaggtggcccagcccgtgccrcatgactggtaaggatctggygccgtggcattccagtgcttttcttctactcttgggtggaagaggaagaggaggcttatcctcsatgagccctcatggggagtgggccryaggatgggtttctcagccaggggygactctgcgctgtctgcctcagacatttgggaatgtctggagacagttttggttgtcactggggaagggtttgctcccctttgcggggagcccagggatgctacagccatgcacagcacagccccaccaagaacagtgcatctycaaggccaggagtgcrggtgggaggccgcttcagctgagctcttctgggaaggggaccacgtggcccagccacacccacattggctcagataggcctctgcctgcagtgggtagcctttggggcacagagcagctgcatctggagagccgtgggtcagagcccctgttttctgtgagtccaaaggtctgcagccctgagcctgggacaggcggttgcaygtagggatggatgtcacgttttgcmacctttaaaagcactcttgttttttgatatttctatgaatgtaccatttgaatctaatagtccatngtgaggccctgcagctaacacctgtgttgtggattttacattttgtttcgtatcttcacaggaggaagatggcagaagctgttcaaaatcacgtgaaatccttgaactggggccaccgtgtccagcttcaggacaggtactgaagctctctccgggaatgggccgccctctgggccttctcttgggcgttctgtgcctggacacacacttacttactgtgcagagcatgctctggcaggctctgggrgttcatgtcctgctcatgggtggggatgaggacaaggagcagatgggagtgactgtaggggaaggggagactgccctttgctgctgagcagagcctggaggtgctgccaaggaatgagtgaggccacattggcagaatggccagagcccagggctgcacagggaggaggcgcttggggctggaaggcctcaggccagagagcgtggacatagctaggcctggggctaatatgtggtgagggtcatcccagtggcaagcccccaccccgtgaacccccttcttactgcacacctccagctccttgggtgtgggtgcaggagcttggtgctttccgctggagcaaatgtccctacttggtcaccgttcctgtcagcccctggggatctccagcacagaggcctatgctcccctggcctacaaccttctcctggggctcagctgccagcacagcagatgcctgaaactggtaccgcctctggcccagcctttctcccggggctgtggaggggacagtggtcccgcagaggtctggtggctctcctcatgcaccatttgcttggccccagggcgggtcttcctggggcttcacagcaggcagcagttttgtgctcactaaatccaggaaagtggagccaggaagccaactgcttgccctccacctggacctcacaagctctcccctatccagggagctaagccacattgtgctgtggcatttctgtgtttctctgtggggctctgtatcccctggtacagtttcctggggacagcaggctctgccctccctcctccctgccctgggcagctcctggacgggcaccaaacaggcccagcccactgcctgctccggagccacctgcagaaggaggctggggcgcacctgggctgtttctgctttttcactcttctgaaaagtgctgccatgagcattgcccggctgtgtcccgtggcagcttcctggctgtcgaggtgattgaagggctcttgctgtaggaacttcacgcagctcagacagcccatagaggcacaggcttgccagtggggagaaggcaggctcaagcaggaggcagagccttcccagaacccttgctgcagcacggtccttttgtcattagaaagtgttggtcgggtgcagtggctcatgcctgtaatcctagcactttgggaggctgaggtgggaggatcacttgagcccaggagttggagaccagcctgagcaacatagttttattgctacatccctacaaaaaataaaatgaactagccaggtatggttgcccatgcctatagttccagttacttgaaacaaggcttccgtgagctatgatcatgccactgcactccagcctgggtgacagagtgagaagatgtctttaaaaaaaaaaaaaagggtggggcgcggtggctcatgcctgtaatcctagcactttgggaggctgaggtgggtggatcacttgaggtcaggagttcaagaccagcctggccaacatggcgaaaccccgtctctactaaaaatacaaaaattagccaggcgtggtggcgcaagcctgtaatcccagcttctcaggaggctgaggcaagagctgaggcaagagaatggcttgaacctgggaggtggagattgcagtgagccaagatcgtgccactgaactccagcctgggcgacagagtgagactttgactcagaaaaaaaaaaaagaaaagaaagcgtgggtcatttgtttctgtgcactatgctcccagccactgttttgccagccttgtcatgcccgttctcttggtgttaccacacccctgaaatcagaaggtgacaccatctggygggcaccacagctccctgctggaacrtgtccgggtgatgaggactgtccccaagagaggtccagccacctcttgctgcacaccagggctgtacgtggcctcttaggaccgtgctgagctggcttccgtccctgctttgacacctgtggttaacatgtccctgggatccctgggggacaggcgaggtgcccccacatcccctccatgcttctcagcatggttgccgcttacctcttggtccatctgagccacagcaccaggccctgctgggggctggagctcccttttaccastgttccctattgatccagttggtgaggtttaatttgcagaggaagtgtttgaaaatcttatctttatctttcagaaaagtcaagtactttaacatcaaagccagctttgttgacgagcacacggtttgcggcgttgccaaaggtgggaaasaggtgagcatctgacttactcgcgtggctccttgtggacccttctgcagaccttgggcaccaactgcagctgtgtttggcctgggtgctgttcttagtaacacgtgctgctggaatcaaaaaggtggcttcttttgaggctgggcacttgtctttaacgtgatcaaataatttgctgccctgctgctcggagtggcatggcaacagggttggtgaccacaccctttttgcaggattttttggggatttgagggtgccttgaagtgcttggagttagaacatctccctgtgctttctgcctgtccccctcctgccaggctgatggttgatgggattccagctccatagggcctctgaactgctggccaagggtccacgctacagggcaggggccrtgggaactgctggccaaggtctgtggtgctcaggccctccggtggggtgatcaccatgcacctgtctgacccacggctttctctttttctcctcagattctgctgtcagccgatcacatcatcattgctactggagggcggccgagataccccacgcacgtgagtgtccccagagcatagcgtccctgctgccgtggcccattcccggcctctttgagggatacrtttttacacacgtgcttcccacagcagcagcttgcacaccctttccccctatactcactatcatcactttctgctttccaattctcttgaatccacactgctgaaatgtggggtccccagtggcctccacgctgccagatcctcrggacagctctcgttctgctctccccctgccccgctggatctgtccccttccacaccaggatcctgcttcctaagtctccattgctgattcccccttttcccttcagcctcagaatgttggaacattcaggatataagcctcattcttcatcttcctccttcacgtcccccagtttaaaaaaagtttgaaataaaattcacacgctataaaatttagccttttttagggtacaattcagtggtttttagtacattcacagagctgtgcggccatcagtcaccaccatccattgccagaactccttccatcatccctgaactgaaactattcccattaaaccctactccccagcgcctcctcccccagcccctagaaaccaccacctactttctgtctctatgaatgtgacaacactaggcacctcgtgtaagtgaaatcgtacatgtaagtccttctcatgtaactggtacgtgtgtgtcccttagtgactcgtatgtgtgtgtcccttagtgactggcttacttcactgagcataacatcctccaggttcacctacattgtagtgtgtgtcagtatcattcctttttatggctagatactattccattgtatggatagaccacactttgtttatctacttgcttggataaacacatgtgttatttccactttttagctattatgaatagtgccgctgtgaacatctgcaaagaagttttttggtggacttcagttttcacttctcttgggttacacttaggagcagaactgctgggtcatgtggtaactttatgttgaatctttcaaggaacgtttcaaggaacctcagactgttttccacaatgactgtgttttacattccttccagtggggtgtaagggtcatggtttcttgtttcttcacgtatcttgtaatttttttattgaaagctgaacatttcaaataatttaatgcgataactttggaaaccagattctccctctgccccaggattctgttgttacagctgcttatttggtgacttttcggaactgactttgtagactcttattctttgatgtatgtggccactgaagtctttacttggttagcttagtggtcarctaagaactgcatggagatttccctaaactaagaactctcccggtctttgctgagggctctgtgtgcgtttggaggggatgccttccacactcaacaggcagcagacagctctgccctagccttcacttcctgcttctgcagagatcaaggtcagctggaggtgagggttcagggcctcgttggtccttcctgatgtgtgcacagtgctgtgcatgcgcctggcctaggttcccaggaatatgctggaacctttcaaagctccagcagacatctcatactttggcttttcctttgaagctttttgggcagtctgttgttggctctaactgttacctatcccctcaggcagctgtgagaagaaaacctcagacaaatgcccccagagaaaggcttttagccctggctgagctccggtgaagttggatgaagatgaccctatagttgctgactctgactcttctttgtgggggggctttgaaagaccccagctgagttctgctctctctgacacatcactgttcagggctgccgctgaggtgggagtgggaccagagtgagttaaaacaccctggagttcccattctcactcagcttcagctgtttttcctgactttaaatgttccctgtgttgctgcaagcctgtggttaatttccataattctgaatctcccagttcttgccagttttatcrctgtttttaacagagaggtgaataactcctggcccagtcttgtgggttgtgggggcagagttgaggaaggggccccggggtgaggggttggggggcagctgcagcagggaaagcaaatgggctgggggtgagcagagaggtttggctgagaccagtccccacgggtctcccagggaaccgtgtgccgcctgctccaagcctctaagtaggctgcagccaagctcttgaagaccacggctctctcggcctggaggccacaccacctctgacttagacccaggggcagtccggtggaggcagagcaaggggaggttctgccacttcttggatgtgaccccagcctccacttcgtcctgtgcttactgtggaaacagggaaaggagcggccccgaggagcacaagcacccccagtccttagaggccgtgggacttgtctggccgccaggcagccacagcagcctctagagggggcaggttgcttatgcacagaggtggggctcagggctgcgtgactttgtaggatgacactgtgcagttgttcaaggcagctgctgcagacagggtcccagtgatcccctctcctggcagctgggctcatggtggttctgcttaaagaaggccacagccagcttccagcagcccagcggtcattgggnttctctgaggccccaggcagagctgcacgtgcatccgcaccagggagcactgcacaggggccctggcctggcccggccctgctctgcacctcacgggcagctgctgacggctctttgggctcacaggggatccagcaggcgctcctggtccttaggaggcaggcagctcagggctgcttcgctctcccygccacgccctcccagggtgtctgccaaggcttgcttgcgttttagtccctttgattgccagacctttyggttttccttgagtaaacctgagaaattcctgactttatttttttttgccagttggaagcataaactgtttgagatccgcttcctccaccagcacatcttgttctcatggccgctaaggggacgttcaccctgggcctcccacctgcttggccgcccctcttcaggtgacctgtatgatttctgggctcagagcccacccgggccagccctcgagagtgtgaagtccgtcctggcttcagccaggtgccctcagagctgcccctcagtccctgcccacctcagcctgtggcacttaccccctgtgcctcctctcctctggctggccttgtaggccacccctgccgcgcagacacacctgagctctgctggccctgatttgctgacctgttctctccccacttcctctctctgagtttggatcccccagaacccaggtgttgctccctggggctgcatgcccctgtctgtttgatgtgtctgtccagaacccgggcagacttgaggggtcccagctgtctgcctgtatggcccctgcagttgctgtacccacctcaggccctgtatcctgctctgaaccagggtcaaggggagggtcctggggaacagaggggaaaggtaccctgcgagggcaccgggacctggagtgcagcagcttagatgcagacaggccacctgcagccccaaagaggccacagcctgcagacaaggactggcagcagggaagccctgtgcatgtgtgccctgggaaagctctgcttgattctgcaaagctggcatcctctttaaggaagccctaggacaggccaaatggagctcttgyccaaggggtcatttctgtcttgacagatcgaaggtgccttggaatatggaatcacaagtgatgacatcttctggctgaaggaatcccctggaaaaacgtaaggcctgcgcrtgcttggtggggtcctctttttgttcaccagagtgagcactggaccctyagagcctgtgctggtgctgggctcctggggctttctttccggtttacccaaaagaaggaaaaaaggcctgttatttgtggccaggtgtggtggctcatgcttgttagcctagcactttgggagactgagcgggaggattgcttgaggccaggagttcgagatcagcatcagcctgggcaatatagtgagacctctactctacaaaaatctgttttggttttttttttggcttttttttttaggtgraktctcactctgtcgcccagactggagtgcaatggcgcaatcttggctcactgcaatccctgcctcccaggttcaagtgattctcctgcttcagcctccaaagtagctgaaattacaggcgcccaccaccacatctggctaatttttgtatttttagtagaaatggggtttcaccatcttggtcaggctggtcttgaactcctgacctcaggtgatccgcccacctcgtcctcctaaagtgctgggattacaagcgtgagccaccacacccagcctacaaaaatctgaaaatattaaccgagcatagtactgtgcacctgtagtcccagctacttgggaggctttaggtgggaggattgcttgagcccaggaggttgaggctgcagtgagctgtgattgcaccactgcgctcagcctgggagagtgagaccttgtctcaaaactaaacaataaacctgtgacttgtgcccctctgcagggctgttgatttactctgtcctgtggctgccttggaggtaataacaataacaggactgccatataaatggagtcagctgtttgttatctaggtcagtggttgtcaaatggggttcccaggagccctggggttccagtgggtcccctcaaggacatcagggagaacattaaggaggggagagccagcaatccctatcccagccctcatctaacaccctcactgtcttctgatttgtacattgggtttccctgaaatctagcaaagactccaaaggcctcagaaacaacatcttgattgtggaagggaggctagcagcgtgcaagtggctctcactccccatgggagcaggtgcagagtcactaagtgcattccgatgcccacagagtgggccatcccgaggtcccaggtccaggcagctcctgcctgtggggtgtggagacttcatgttggcagggagcagagagaccaccagagggcggcagaggcttggtcaatagcagtctcgagccttccccaggagaaaatatcagtggaaaagggtcccacttctgtgtgtgcccgaatgtgcatggtgtgcgtgcagatgtgtgtggtgtgtgtgtgtgaatggtgtgtgtggtgtgtgtgtgagtggtgtgtgtgtgtggtgtgtgagtggtgtgtgtgtgtgaagggtgtgggtgtgtggtgtgtgtgtgtgtgagtggtgtgtgtgagtggtgtgtgtgtggtgtgtgtgtgaagggtgtgggtgtgtgtggtgtgtggtgtgtgtgtgagtggtgtgtgtgagtggtgtgtgtgtggtgtgtgtggtgtgtgtgtgtgaagggtgtgggtgtgtgtggtgtgtgtgtgagtggtgtgtgtgcgtggtgtgtgtggtgtgtgtgagcagtgtgtgtgagyagtgtgtgtgagtggtgtgtgtgtgaatggtgtgtgtatgtgagtggtgtgtgagtggtgtgtgtggtgtgtgtgtgtgagtggtgtgtgtggtgtgtgtgtgtggtgtgtgtgtgaatggtgtgtgtatgtgagtagtgtgtgagtggttatgtgtgtgtgtggtgtgtgtgtgtgagtggtgtgtgtgtgtgtgagtggtgtgtcacatgctctgcttgtcattgtttcacacttcacggggcatctttgtgtggggtcaggactggattcccttgaatggatgtggtatagttcctttgacctttctcttgttaatgagcatctcagtagtttctcttcttcatcattatcaatgctgcagtgaaaaccttggaggtgcatctgtttaccatcagaagtgcttctgacacattttcccaattattcattgtgataaaacagacatagtataaaatttaccactttaaccttttttttttttttttttgaaacagagtctcactctgttgcccaggctggagtgcagtggtgcgatctcggctcactgcaacctctgcctcccgggttcaagcgattctcctgtctcagccctctgagtagycgggactacaggtgtctgccaccacaccccgctaattttttgtrtttttagtggagatggggtttcaccatgttggccaggctggtctcaaactcctgacctcaggtgatccacctgccttggccttccaaagtgctgggattacaggggtgagccaccacrcccagcccacgttaaccatttttaagtatacagttcaatggtattaaatgtattaataatgtcgtgaaaccatcaccactatccatgtctggaactcttttcatccatgttgtatctgcatttccttctttttaagactgagtaatattccattgtacaggcacaccacattttgtttatccattcatctgtcagtggacacccaagttgcctctgcttcttggctgttgtgagcagtgctgccgtgaacataggtgtgcaaatacctcttgaagacctttcagttcttttggatgcaaacccagaagtgggattgctggatcttatggtcttgaggaacctccatcctgttcccaacagcgcccacaccatcttacattctcaccagcagttcaggaggactctgggctccccacatcctcgccagtgcatgttgttttctgtttttctttctttaatttttattttttcctttaaactgttttcttgatgttttctgtttttttgacagtggccatcctagtggctgtgaggtggtcttatacgctttacaaggggagctgcccttccgtcttaacactttgtgctgacaggccaattccatgtgtactctgcctgcttccctgtccttggtaactcaggcatcagctttttgataagacacaaaacagaaaggagcctctcctcccatacccctggcctgggcagtggtcactgctacccakggcgcccacactctcctgagagcagtcactgctacccacggcgcccacactctcctgagagcggtcactgctacccacggtgcacccacactctcctgagagcagtcactgctacccacggcgcccacactctcctgagagcggtcactgctacccacggcgcccacactctcctgagaacggtcactgctccccacggcgcccacactctcctgagagctgtcactgctacccacggcgcccacactctcctgagagctgtcactgctacccatggtgtgcccacactctcctgagagcggtcactgctacccacggcgcccacactctcctgagagcggtcactgctacccatggcgcccacactctcctgagagcggtcactgctacccacggtgcccacactctcctgagagcggtcactgctacccacggcgcccacactctcctgagagcggtcgctgctacccatggtgcgcccacactctcctgagagcggtcactgctacccacggcgcccacactctcctgagagcggtcactgctactcatggtgcgcccacactctcctgagagcggtcactgctatccacggcgcccacactcctgagagcggtcactgctacccacggcgcccacactctcctgagagcggtcactgctacccacggcgcccacactctcctgagagccgtcactgctatccacggcgcccacaccctcctgagagcggtcactgctacccacggcgcccacactctcctgagagtggtcactgctacccacggcgcccacactctcctgagactgtgctgagcttgtgctggtttccatcgactgcctgctgccttccattggacccactgatcgtggtttgtctttggacttggtgatagtatttcatgcagaaattttaagtttttctgttgtcacaccaatcactttttcctgttatgccataatttctgggttatctgtttttttatctttgagacagggtcttgctctgtcgcccaggctggagtgcagtggtgcgatcatggctcgctgcagccttgatctcctggattcaagcaattctcctgcctcagcctcctgagtagctgggattacaggcgctcgccaccacgcccagctaatgattattttttttagggcaaggactcgctatgtggcccaggctagtcttgaactcctgggctcaagtgatcaccctggcccctcaaagtgctgggattacaggtgtgagctacggcacccagactgtttttttaatctttgactatctgctgagttacacatgatctgactctgtttgcatttgctgtgatcagtggtcttttcacacatttacstgaaaagcctcgtgtcacagcctcatttgagatgagcgtgtctgtgagcatgcccatgtgtgctgcacaaatcgccagcatggtccttgtccactttcacgtctggcttttctcttctcttatctcttcttaccctccagctggtttgtgtattagggatgtgatcctctgtcgcttgtggtgcagattttctcagcttctagtgtcttttaacttgtgtgatgtacaaatggtttaagttttttttaatgtaacttaaatcttttacacttagtggctttttgatttattgcatgttcagaaaggcctgccccacccccaagattttttttttttttttttaagccctgtattttccttatgggygtccacaagtcggattttcttttacttccttgggctggctgcacttcttctgcggtgtggtggagatgggttgcccgggccccagtgcccatctcgaggcactgttctcactcggcgtcctgagttctgcctgtgcctctggttgtctttcacgtaggcttctctgggtggagtctggatgcccctccagcccctgcaggatgctttgtctgctggaccttcagggaaatggccttggatgtctggcagccccaggatgtctgctgggcccctcgatgtactggggtcttcggtgacggtcactgcagcccagcactttcaccaccctcgttgtgcctgttcccctcagaggctgcccgcttgggcctggggagggggcccggtgctctgggtgccctggccttgctgtctccctagcaaggtggctggggcttggggagcgctcctctgcaaccctgtgctgggggcagctggctcggccgggaagacacagctcyagatattttgttcagaaaagaaactgcagtgtttattttcttcagaaaaaaaacatttagaagattttttttaaagctctttcgtttagaaggaatctaggtatgttattgtttaagaaaaaaagtgtttgcaatgtatcagtcacccgtttcattctgagcatgatttatgtgaggaaatggtttttttaaaaattaagctggagatatatccctgtacgatgcttctgtgaaaatgcggcttttgtccggcgctgttaatgcaagttgtaacagtgtaatatgggagtcagtgtttacatgttacattcctctgctgcagtcaaaataagcccggagggtctacagtagcatttctgtattttatcagcttgggctggggctgaggggaggcctccactcacacttggaggggctgtttctgccagatttatttgccttataaatattccccatgtttattttaactcgcctttaaaatggagctgaaattaatatggaccccggggctgctcccctggcccctgagtgcctcccgtagtcgggtgggacatttctacctggtcccatcctggaggccaggtgsgcaactcasggtgcctggcatcacagtgcccctcctgcagtgggcactctgtcccctggttggctcctccaccaaggaggctccctgtccccctggccccaggccctcggtgggctctgcggcgtgcacgaggcctccctcgtccctctctactacaggcacaggctgccaccaggaactcctttcagcgcacgtctgtgtggggcccactgccgggagctccmgatctggcgagtggtgcccacagtggggcctgggacccagcctgcaaggtcgtaccatgccacttttgccccagagaggccactcaggcatcacagtgcacctcgggccccaagttgggagcccccttcctcctttgtttgcatccaggtcttagggagcccagggctggacagatggcagaggcagggggatcgtgtccaagctcagtcaaggggagacagaattaaacagtgcacttcactaaacagccatatgctggcaaaatggggccatacctgttgaccagagtgggctgagcacctggtttgtaacctaggagggtgaggaagacgtgcagaaaactcagaaaactcctgaaaaagcagtgtgagcttgtgggtgggtgagcaggacccttgagtgcactggggtggggcgggggacgttctggctgccccactcccatagccacgccctggcgcaagggactgtcctcccagtcttggtggggaccctgggaaggactccaggtcggctcctgctccgcctctgccatgcagatgcccgccttgtgccagcccgtttgccttttctgctgtgttgtgtctttccttctctggaactgcaagacaggttgaagaagagaggaggtttctggggaggtacagtgaccctgggcaggcagtggagcccctctgggaacaatggccactgcagggaggcaggggtgcggaggggcacgtgaccccaaatgactaggctcagagggggcatgcagccttgcaaaccaaaccttccattccacagagcaagcccccggcaggtggaggaatgtggaaggcgaggatggtgagcccacaccggggagctcctttacagaggcaggcactgggggtcgggatccaagtgcagccaagaggagcccgaggcccagaggggcctggcaattaaggggggccaaggagctgagctccaactccagtcccacagccgcacaatcttcctgccacttcctgacctggagggctgcctccaccgggaagcctccgcacccggcagggacttgggccccgccagtgtgccttgtctctgcctcttgcacacccacggccctgggcttcgtcttctccctcagtgccaggttttggagctcaggtgccctaaccccaatatagggaattgtggtccctctattctagtcctccctcttgctgtgtctgtaggtccgctttctgcaaagcagggctctgagctggcaacactgggatggggccgagggcgtgaatgagaccgcagcctcctctcaggtccgataacggaggtactgcttcccggaaacaaccagggtctgcctgttcctgctgccagctctgtagcccctgcccaggtccccgtgggggtttacagagcatggggccagcctctcctgcagctgccaggctggctcaggggctgaccagcccacacactgggccctgggggaggggctgcagccagccaggcctgtccaccctctgaggctgctccaccagcctgctgctgtctgtcctcgcactcctggggctccaagaggcagagtgtttttataacttgggctggtttaaggctgcctgtcagtgtgtcatggaaagagcttttatttgacccttaggaagtccggaagccagccaggtactgcgatcatttttctctcttcctaagcacaagagggaagaagataaattttatcttgggaagaaccacagccatttgggagaaaatttaatttaagtggcacattccgctggtgtgatgggatgtccttgtgttcagcaatagggagaccagctgtcctcctggggcttgttaccagactgcaaagcccccgccacctctctgtgtgcgtccctgtggctaagacatgacaaggtagggctttcagtggcatttgttacagggccagcacacagaggctccggcccagcatctgcccctgaggggttgggtggggcrgcggggttccagccaagccggggaaggaggccttcgtagcacccccagccctgtgctgcctccctggggcatctgcagcttggcggcccatctggtatttcctgggctggcaggacctccaaggggccaggtgcctcccatgagactcactttgtgtgagtattccctctggagagcaggccttcaagctcaagaggcagatggattgctctttaagcctaggcttcgtgggcctgaattaatgcttttgtttctgcttcctccccccattccaattttgaacaagaaagcctgccctgtgattaggctmatcctgcagtagttattatgcctctttggaaaatgtttgcacaccaaaaagcacagagagctgagctgctgggatcacatggaaaactgatttttatttgttttgttttgtttgttttagagacagggtctcactctgtttcccgggctggagtgcagcttactgcagcctcaaactcctaggctcaagygatcctccttcctcagcctcccgagtagccgggactacaggtgcataccaccatgccccagtaatttttttagtttgtagagatggggacaagctgtattgctcaggctggtcttgaactcccgggctcaagcagtctgtccaycttggcctcccagagtgctgggattgcacacatgacccaccgcacccaacctctgggtcttttaatgyagcggtaagttgagtggttccagccccctacccccaggtcctgtgagctggtcccctgacttctgtggccagcacctctgacttcctgtggccagtcatggcttgagttggttgctgcaccacgttcctgtctgtccctacccctgctgggccgtgaatggcctgaagaaggtgtctgtaggtccctgtctttgggtactctctatccctgtgatctggaggctttggtgtctgtcttattttgctcgggcatttttttactttagctggtctgaacggagttctctgttggaattctcgtatcctgcattcttcaaagggtaaacattcacataatttgatcaatgcggggaggcgtacagtgaaaaccaatgctgtcaataatccttgctcatgacaacaagaagaggcccaaaatgaccctccacacgagcgagacgtgagcttttgttgagagatttcagccgaacacatagggtcaaggatgcccactcgggaatatgcccactgcacccacctcctcctagctgtaccctcagttgctgattcagagctggcagctgagggatgggggcacctgtgactttgaaggtggcccttgaggcgggagcttctcctgtgccccgtgggtgccaggacaggaggcccgggcactgggggactccgagggagggcctggagagtcacctgcccccgctccaatccaggcctggtgggtcagcatcgtgtaggaggtggggatgtacacgtcggtggcagagacagcaaacatttgtggcaaaatcaggagggtgtgttgctgtatccctagcaatgagctaggaggcccggagagcagcctggcccccatcctgcagctgcagggcccattcctggagaagggttggccttcagggccaggaaggccctgacgtgcaggggcccagctgcccacagaggggatgcattggcctcactctgccagtgcctgcacagcccagcaggaagcatctagcccatgcacagccacctctgggagcagggggcaaagggcaccacacaatgggctctcgcccagttacacccttgcatttagggcaggatatgcaaagcagcagagttctgtttatatttgcagtaactcataacttcatatctttttttttttttgtgatggagtcttgctctgttgcccaggctggagtgcagtgacacgatcttggctcactgcaagctccacctcctgggtttacaccattctcctgtctcggcctccccagcagctgggactacaggygcacatcgccatgctcagctaattttttgtatttttagtagagayggggtttcaccatgttagccaggatggtctcgatctcctgacctcgtgatctgcctgcttcggcctcccaaagtgctgggattacaggcgtgagccaccgcacctggccataacttcatatcttaaacaaaagcttgtacctttcactgcatatagcaagtccaaaaagagtttggtttcgccattttggaagtgcacttccgtgtagagatgtgtatgtggtgcctatgtgtgtgtgcatgtgtggaagtgcktgyataccgtggtgcctgtttcccaagtgttgccggccctgagcggggctgggaatgcatctctgcaatcctgcttggctgggggtcccagggtcccccttcgctgtcctcacatgctgagtgaggcatgtaaccaccttgtgctcagccggccaacagagctctgtctgctcaccctaatcctgacagtggtgcggttctgtccccagccacagtgaggaagctgcatgccagatgcttcccgcagggcacctgcagaatgattccaagggatacaccgtgttttgaaatggaattatatcattagtacctgctgggattagcaatgacattgggcttatccgtccttacatcacctcctcttgttcaaagactgaagggtaatgtgggagcccacccacgtgcagctgccccgctgggagttcttgttcgtgttaggttctgtgcccgtttgcatgtgtgtgcatgcaygtgtctacatgagtgtgtgcatatgwatatatgaatgaatgtacccatgcgagtatgtgcgtgtgtgtgtacatttgtgcccgtgtaagagtatgtgcatgcaggtgtgtggcatgtgtgcacatacaagtgtgcgtgagtacatgtgcatgcaaaacacatgtggagtgtggggttgaacaatagagggttttcactacaagagcaaatatttccaatgactgctggtcgcagtgtcctgtgctgcctcccttgtccctggggtccttcagtcccctctctggggagctggccctcctggccctgcgcctagctgtgatagggttggatgtgcctctggcacatggaagggcccagccttctgtggtcttgagagtgctttgctcagatgatgtcttcccttgcggtctggtggcctccccatcctgccaagcatctcccagcttccaccctagcccaggaggccccggggggagagaaggaaagccatgtgctgctctggtggatgtttctccatgcctccgggtgccttccaggggacaggtaccacttgtcactgacacacacgcccttcaccaccaggcgatttgctgattcacaacatgcttgacagtgtagccttggaaagtgggctttgtcccctggggcaarctgtttgaacagtaaccttggagcccacgagctgaccaagggcctgggcaaaggctgcggggttctgctctgactgcacttggtcaataagggcctcagctttacatgtgctctctctctgtttctctaacaggttggtggtcggggccagctgtatcctttgcaagcgtgcaggtggccgtcctgggaactggacactccttcccttgagtccctccctgccacccgcccttccggcaggctctttgctgcctcagatcggcacttactgggcctctcggygtggaggatctactgtgcctggggacagtttgaggctgacctctggccagggattcctggaggctcttcctgagctgggacagctggacatggccatgaggcagctgggctgtcctccctcaagagcagccccagcctggacccattgcttcagaagggacaattagacagggagggtcaggagaggagctgcaggagggcctggggtcaaggggacatctgagggagatgaaagtccctggccgggcgcggtggctcatgcctgtagtcccagctacttgggaggctgaggcaggggaaccgcttgaacctgggaggcagacgttgctgtgagctgagatcatgccactgcactccagcctaggcaacagaatgagactccatctcaaaaaaaaaaaaaaaaaaaaaagccccaagccgctggctgagagcacaggtggaagaaagcagctgcctggcatctcccgtggctgaggtcctccctgaaccagccactcctctccatcccaactggaatccaccaggatgcaggcctcgccctggagccgggatggacagcacatgggagcagaggccagaggccggcctagtccgtgggtgctgcttggcggctccttgctaaccccagcctgtgcacttgagatgtggaggtgggggtcttgagttgggagcctcctccagggccagccatggatgggtggggtgtgggctgtggcacagggccctggggtgttgtcccatcatttccaaaattgggatctacagtgctccttagctggcaccccacagatgtggccctggagtgtgctggcttcctcaccgggattgggctggacaccaccatcatgatgcgcagcatccccctccgcggcttcgaccaggtagtgctggaggmcccagctcccgcccctgtggctctgaggccttcctcccacagccccctcccaggcaggtgcagtgcagtcatgggccacgagtgatgcctgaatctttagagataacccttgaattggatgaggaggttgtccaggaaatatgcagacactcggccggagcgagggaggagggtggcagtggggcgcacagctgcacagaggcctccagccgaccacaggcacagtgaagggaggctcagcccagccttgtgccggcagagcaggtcaccctccgggtcgtcccattagtaagaggccggtgtgtgctgcagaagtgttagccccacctcagagacccccaactccctgctctccccttgcctgtcccctctgagggagtgggggtgaaataagctgtaatgtgtgagctggggtgagggacacagggcagcgctggctccgagacagcccgtgggatcttggcttctggacaggtgcgctgtgtacagtggccttcatctgtgtctggggtacacacaytcatgtggccagcaggacgagctcctagattggagcaatagagattttctttttttagctaaaaactcttcaagggaaagtctcctgttaaaatagaagtctggagttgtcattgtggagatgtcaaacactccatgactgccacgaaggaggcccctygcagggtgagctgtgcagatctgcaggccctgctacaggtcctcggccgaccctcagctcacagagcctgaggaggtcacctgaggtgggaggagccaggcctgtcatctccagactcccagtgccacccccaggctgactcagagacgtgtccctccacccgtgtggccatgtgttgttccatcctaaagctatggcacactcccatcatrtccctcagtgcaaacccaccgagccctgtggtagggacgcagtgtctaggaaggcctcagagccttcagatgtggggagggtgagctggcagtggacggaggaggaaaggggcctgcagaatgggggccgtgcccaggcaaggaggatgcacagtctaggcagccaggctgaggggcgagggaccctgtgtcctggacaggctccatggttctccctcagagcctgggatggccatgccctccaggcctctggaggggtgcaggagtgatgaayagcctgtgcggcagcccctctgcagcacagccagccctgcccggcgggccagactcccacacacgccatctagagccagctggcacacccgcacaggtgtcagaggatgttagcagtgactgtttttctcctcttgaaaccagaagctgtggccagcttcactgctggtccrtgcaagtccccattgtcctgggaacagggcccccatctgtagctggacttggggcgcacaggcctcctgggccgggagggagaagcaggactctctctgtccctgatctggacctgagcctgctgtgcctacatttctaggcgggagcagagtctcctacctaccctcctgkctcctggatggcagaggggcatgttggccacatgtggaggggtgggccaggagcaggggccatcttgttggaccagggcacagctcctgggggaaggcacgcttctctgccattggttttagtgaagactaagttttttgtttttgttttttaaagaaatgtgtagatgtaccaggatttgtttgtttttcttttttttctttctttttttttggtttgagacagagtctcactctgtcacccaggctggagtgcagtggcacaatctcggctcactgcaagctccacctcccgggttcacgccattctcctgcctcagcctcccagttagctggaactacaggtacctgccaccacgcctggctaattttttgtgttttttagtagagacagtgtttcaccgtgttagccaggatgatctctatctcctgacctcgtgatccgcccgcctcagcttctcaaagtgctgggatcacaggtgtgagccatcgcacccggccttgcttattttttcttttagagatagagtctcactctgtcgcccaggctggagtgcagtggtgtgatcacagttcattgcagcctcaaactcctgggcttgagggattctcccacttcagcctcccaaaaggttgggattacaggtgtgaccgtatctggctgatgaagacttagttaattagcatctagagaggagcccacaggctgagtgaatcctgaccatagggcccagggttgaggacttggagccaggacaggggctagacactccacagagagcaagaggacgtagagcagggggcagggtgtctcaccccgtcttccgcacagacccctctccgcccttcaytgaggccttcgagagcagggcagggccagagcctctctcccacggccacctggtcttcatggcctgtcttcttgtgctttgcagcaaatgtcctccatggtcatagagcacatggcatctcatggcacccggttcctgaggggctgtgccccctcgcgggtcaggaggctccctgatggccagctgcaggtcacctgggaggacmgcaccacmggcaaggaggacacgggcacctttgacaccgtcctgtgggccataggtaagggcacgtcgagccacacgckctgtctctggtctcccygaggtgcatggagaatctttgccccacttcctgtcacctcccagggctcccccatcctgctggctgccaggcgggttggccgctccccagtgcacctcgagagcaaccgtgaaggcctgtggggcggcactcacactaggctgtgcccatcttgccatccccagcaccttgcatctctgcgtgtctccccaccaccgtgggacatgctggaaaaaaccagagaagagactgagacggcatcagccaggtgtcctcatygaggatcaactaggcaatcatcctcgccttccctggcccttgagcaattgcttattaaggtttcagcacataaatcctacttgtcaccttccaggtttaagtcttggtatgtttcttttctttttttttttttttttgagatggagtctcgctctgtcgcccaggctggagtgcagtggcaacctccgcctcccgggttcaagcgattctcctgcctcagcctcctgggtagctggggctacaggcgcccaccactacacctgactaatttttgtatttttagtagagacggggtttcaccatgtaggccaggatggtctcaatctcctgaccttgtgatccacctgccttggcctcccaaagtactgagattacaggtgtgagccaccgcacctggccagtatgtattttttctttagcatattaaatgttttgctgcttcaggctttccagctaggtttttttctttttttgcgtgtgaaacagggtctctctctgttgcctaggaggagtgyggtggtgtgatcatagctcactgcagcctccacctcccaggctcaatcaatcttcccatctcagccttctaagtgctgggattacaggtttgagctactgtgcccagccaagctagtttgttgtttttaacataaaaatgatatggatttgaaagttttaaaaattatggtgacatacacataacatcaaattcatcatcttaagcattttaaagtatatagttcagtggtgttaagtacgttcatattgtacaagcagcatgaccatccatctctagaacttttccaytatctccaaactgagctctgtccccattaaacactcactccctgctgcccgggcactcacccttcactgtgtgtctctatggatctgactcctcgagggacttcatgtaagtagaatcatgcagtgtttgtccttttgtgactggctcatttctcttagcacaatgttttcagggtgcatccatgttgcagcatttgttagagttagcatttgtgtagcatgtgccagcatttccttcctgttgaaggctgagttgtatgtgtgtccattatctgtcagtggacacttaggttgcttccgtcttttggctgttgtggatcatgctgctgtgaacatgggtgtgcacaagccgcctgttttcagcacataaaaatgacacagagtttttaaagttctgtccagccttctcgtggctttcagtgtttcccagtgggtccctttgggcctggcaggtcatcacatgccaggagtggcattttgcaggcctttccagaagtcacatttcgaaggcttccaaagacatcacccttccagtgctgggcagaggcctgggcgtttcccggccaggcgtgggctggctacaacttgctgggcacagtctggtctcaccttcttgctctctgtcaggtgtaggtccggttttgcatggggcagtggccgagcaggtgtggggagtgtggacacagccaggggatacctgtgcccaggcctgggccggggctgtctgacgggactggcaaggggcagctggagccaacagggatcgcccagacactgctctgtcccaggcctgctgcaraggaggccattgcagatgggccgccgcaaggagggctgcgggtcctcgtcagggtgggtggcggcacacacagcatgcctgctcagatgtcctacccacctcggtgcctggccgtctagtttaggctcctagttttcccaatcaccctgtcaacttgcatgttgaaggcgggagcaacctagtcagtgttgttagttctccgaggmctttctgtgctgagcctggtccgttgtcccctgcgagagcccaagatcagagccagggtccctctcagatcacctgcctccacctccatcagctaaccgggcttgcgtggggctggccaggggtcagtgtctcctgggggagggctcccagaggcacaagctgtgtcatagggtgatgcacttctgaagcagtcactcggaatgggaaatcagaaaggaaaccagcctggagcggctgaggcttcacttttgtgcagtggacacaagcgcagaggtgatgaccggggaggacctgagatgcctgagcgcacgcagggctcttggcccggaggtgatcagtcagcaagagcaatgttctcagccacgttgtaaaagtagattttaagtaagtttattatgataaacactacgaaggattaggtaacattttggactctggagtgtactgatggttctcatcctaaactccactttatttttctttcaaaatttatcctcctactgtcattcccaaataaactccactctaaaggggaggtggcgagtttctccctcccaccgcgccctagccctcctcctctgtctgctgacacctccgttcacccacagcataagggagctgttgccattgaaccgaggggcagccctcgaccaagcccatagggatgtagcagaccaatgggccgggggctgtgtccccggaaagccggggcgtcagcctggcaggcaacaagcgaggcccctccctactcagcagagctgccgtggcctgcacgcccatcctcccttgctaggagtctgttttatttttttgtactttcaaaatgagcatcccccagacagtctgcctggcatgattgatgctgggggtggaagcttttcgcagtccttggcctctgaccctgcttcccgagggcggcgcggcttctgcgcgcctgctgggggccgctcgggcatgtgctgacttcgctgctgctcagagccaggttttgtaaacattcaggagccacttcccaggtcagcaactgcgagcgttttctgctggtttgtacgataagcctttaaccaagctttatttctacttgcaataaaggatgatccactctgggaggttaaaataaagcgccctaggggcggcacagctggcaatgccaacatctccgactctgcttcctgtaccgggygtgcactacgtccgcacaagctgggctccgacaggaaggggggatgcctccgtgcccggtgcacacacacacagaaggggcccaggtgctgcacagagctcccgtgtggggccgagtgctggccctgcccgttgcccgtgtgcctggcgcctggccgcagctggcgaggaccatggacattggcattgcgaagtgggccctgcagtctggaagcagaggaggaccagagccccttcctcgacgcagccttgatctccacgtggtggattaaacatattagcagttaaagcagttaattgctgtgcagggggcccccgctcattgtttgtctctgaatcacccgcccacaccaggtgtctcagataatagactgggaacttcagtgaggaggatttcctgtctgcagatgtgccgattacagcgctgagtgaagacagtcagccagcactgctgcgggctcgaattcgcccgctgagttaaccagttgtggcctgaatccctggctgtctaggggagcagggccaggctggggcatcctgagcaaacgcctcccagtgcaggggcttctaagtgcagttaagtttagatttggttttaaagaagggacagactgcctytggactgcagccctgaaaaactggaagttgagatcttcatgtgcccctttggcgtccccagcccctctggatggttctctgtccctctcttgagggtgagatgctgaaggctctggcgtatccctccctgcaccacaggagtcctgcccatggccagaagagccagcagacacaggaggggactcgctaaacctgggggtcccacagccaggcagctgttgtgcctgagtgccagggagggtggccacaggtctgcctggggccttgtgatatggcaggtgagacgagacccagggaaggaatccgtctggatcttaccccagccactgaagctatttcctctttgggctttatcttagataactcagagatgtccacctgtgtgtaaaccagcatcagagcctgaaacacaacatgcatggagcatgggagcttggcttcccggcttcctcttggcaccacacagaggccacccccacagcctgcccctgtatagtctcccccaygtggcacgtgtgcctggaccacagccagagagactggggtgcccaggagrtgatgatgggggctggcggtgcccaggaggggagctgttgccagggtgggctgcagccctgggctcctctctccacccaggcactgtttgctggcatgtacrcggcaggcaactgtctttgctcagctgtgctcggctgatggctcccgtacaccgcagactcagctacacaagtccctgcggattgtccctctgttgagtgccaggcagcaggaaagggcagaaagcaagaaccaagctggggatgggtgggagcatcctaagcctggtgagagggaaggggcggctcctcctggatgccctctgtgctggtgtgggtgcagctggggcttaggggccgcggtgggtgtggatgctgcccgggcgagggggctgcggtgggcccatcaggactgctctcagggatgcgccttgctgcagctgcgtgaaaccaagtttgtggctatgctcttcccggtggggatgggcccagcagtgaccctggcatccacatgcctccatgctctcagggtggagtggccatccctgagcaggtgacacggatcggaggcccctctttgatagtctaacacctttttattttagtgcaaatttagtttgtaattaatgacatcaagagagacccaaatctgcctccattgtgagtttgatattttttgaagtggggccaagatgaacattcatggagctcttcctatgagcggtggctgcggccttcccctccacaccacgtggccccgggcgtgcgctgctgctcctgagacagcactgttggctcagccctagctcatggtggtgctaacacctcacagaggccaggccagagtagcaggaggcagcgccctgtgcttacccaccagcctggtgccccacgcttggcttgagggctagttcacacttatgtccagagcccacagctatctgacaggccagccggcacctgcatacatggwtgtccaactgggtcttgttaccatgacaaattcagtacttaatgattagaactgagtggaaaccaattaaaaaaaaaagaacaacatggtgaaaagtcttctagagataggtcagcaccatttatgcatattaccatgcaccctctaatgtctgcaggtgccctggggcagccaacctgttacaattgcaattatgttaacaattgttaaagggccgggtgaggtggctcatgcctgtaatcccaacactttggaatgccaaggtgggaggatcatttgagcccaggagttcaagaccagcctgagcaacagagtgaaacctcttttcaaataattaataataataataataataataattgttttttgtttgtttttgagacggtgtctagctctgttgcccaggttggagtgcaggagcgcgatctggctcaccgcaacctccacctcccgaattcaagygattctcctgcctcagccttccaagtagctgggattacaggcacccgccaccgcgcccagctaatttttgtatttttagtagagacagggtttcactgtgttagccaggctggtctcgaactcctgacgtcatgatccgcccgcctcagcctcccaaagtgttgggattacaggcgtgagccactgcrcccggtctaataataactgttaaagcaataatgaccactcgccacagagcacgctccttcctgggggtcctctgggcctgagctgggggctgcgccgtactccaaggctgactgtggggtcttacacatcataatgcacataggcagcttgagtaggaaaggcccttatgctgcctgaggggaagctcacccccaccccccaaggagccgccctgggtatgagacatccctggaacggcctaggggtccctggtggctgctggcagtcacagcaagtggccaatcaggtcccattgaggcccaggggctcactcatttattcaactaacatggcgtctcgatgggacctgaggccagcagggcaggtgcgtccccttccccctggtgggctcatagctgcgggtaggggcccggggctcattgagaaggtgcgattccagaaaaaaaaaaaaaaaaagaagataaatattttaaaataataagcttcaagaatctaagtccagttccaaaggcatacgctcctctgtgcctggtccaaggtgcctcactggggcaagtggcaggccaggccccgtgagggtggctggctctgggggccacatgcctcatgagacagtcgccaggtggcccacagggcctgtgtgtgaagccgtgcccgcctcgcatcgcccaccggccctggagcctcccactcccacaccctcgtcctcaggcgcagtgcttggccctggctgcctctgtctggatcacagccactggctcaccctgctgtactcctgctggcacttacctctcacctggggcgctgcctccttgctcttctcttgggaaaatgtgtcccaggcgggcgtgaaatcagagggcatgcctgttcttcccatcatggatgagagaggcgcatgatactgcatgcggctggccgtccccgtgtccctgtgtccatcagaatagatgggagtgacccatggtgactgtgtgggtggtttttgggcttcagccttctctggtccctccttggggccaggctggctggacaagcatggtggctgccctccatctcctgggccattgacagcagctggtggggctctcattgtgatcagaggagggctgccctgcacggctgttcctagcactggccacacatggagatgggctgtcctgcgtcaggggtgctgcactgctgggcctggggctggaggcagctccgggctgcagagatgctcagcccagtgcttcctgagtgtcagtgttgtgggccagccacacatatacataggaagtgagcacgtccatttgtacctggaattactatttttttggcagaaggacaaactttgttgggcccatcagccccaattctgaaccaagtccagtgggcagcaatgagacccactttgctaccagcagagacatctctgcagtggcaggttcgccaacgtgccagtggttgccatctctgaagggacgttccttggggcttgcggccatactctgcaccatggtcagcagctcttctttgccttatatgtagtgggcatggcctgccttcaggatggctggtcagttcggccacctctggctcccacattgaccacagctctgttggctgagatgatcctcttggagggcagcttcatgtaagtcttcctggtttccgggctaggggaggtgactgcggtgtagttctcaaaggcccaggctaacaagttccagtctcagcctctcctccaggcagcgcttgatggtacaggtgtggtgcctgcagggaggacgctgccgacgtccagctgggccctcttgctacagtacacaaacagaaattggcccgtgtggaggcccttggtggtgatggacagctctgtctgctgcttaaactggtgtggatcctggagaccatctcagcaggggcatgtccttcaaggtgcccttgatgtagctgtgccgctcagctaagtccacagcatgcaggcctatgagccctcctgcttcatgtgcacaaggaacacagagctggtgcccttcctctgcccacgaatcccgtggcccacgactgctcatgaatacagcctgaagagctgtacctggaattttaatgcccttgtcrtttgcagaaaatatgccagagtgtcatgtatccattacgtaataagctcttacaaagaaggaacatggtgaagatgcctataaatggatgagaaaaggcaggaactggtaatttacaaaagaggaaatacagttcataaacacgtggccaaaaattacttcatcttactagtcatcaaagaagtgcaaattaaagcagcatgacagagagtgctgtgcgccgcctgccccaggaaggaacagagtctaaggactgccctgcgcccagaagcccccactcagctggccgcccttcctttgagggtctgccccaggaactcaactgacacatggcaagctggtgccccaggtctccatcctggtggtgtctaggaagcagagccttgagagtgcctgtcctaccccaggaggggccattcagcagcacttggcaaatgctgcactgggcactccagagccaaggcttcgaggacggagctgcagggagcacagagccgccccatggggaggcctgcagtgggccacaggcacagctgggaaagctctgagcacaacatgcagggcgaaagacaccggtgcaggcacccttctttccctaaatggcctgaatagtgcacatttatcctggcataggagggaaatggtcgggagctgaccaggcacaactgctttatcctggcataggagggaaatggtggggagctgactgggcacagccacctgcatcctgctgctcacagcattcgggccccagtgggtccccaccttggcacaagtcgtccaacctcctgcagggctccaggcctgagccagtagggcctaggacgcctgattggctgtccagcaccagcagggagatctggcccttctctggccactgcccagtcctttgctcagcaagacccatagtggggctcagggcctggtgtcctgccatcagggctggccacggctagggacgtggccccacccaagtggagctggcctcttccctgcacccactcccagccacgtcccaccagcccagcttctaaccccactgtgccctcggctgccctcctcagggctgagcctgctgcctgccacaggccactcactcttcttttgctgttcattcccgaagggctgtggagtccctgcagggccaggcgtgtctgtgccgcgcagcccactctcccctggccatccagcctgtccagctgtcatgcctttcacattagtggctccattacattcccaccgacttcccagagtgatccacagagcatgtgcggaagagtcctggctttggatgggccacctatttccatgcctcttttatctcttgtgactacttttaaatttatctttatttccttcgggacctggggacagggtttggtcagcacctgcaaggtctrtagttgccatagtgccatagttaccatgaggaacatgatgagtgctcttggcttcccaggaccagccaggcaagcgtgcagaggagagtgtgggtgcagcgtcagatgttctgttccggcacggagcaggcaccaggaagtgctgggcctggtgggctggacaccaggttgragagggaccagacggctgagcgtgagcccccggcctgcagggaccacagcccctccttcgtgccccagccctgcccatggggcccagctccttcctctgatgtgggctggcatcccctgtgtctgggctgatccccgaccggtgccagccctcccggcacccaattcctgcggctgagcagagcacgaggctggagccggcctcccgcaagctggcttagccaagttggtatgttttgactcctgccccgggacagcagctggagacttaagggttccctctcacgggagcttcagcttccagatgcttaggtgggcgccacccgcataccggccagcagctggtttgtcccagccacgatgagcaggggagctatgcttttgaggcaaaattgccttcgccattggtggatcatcctgagcccctgggagccgagagcacctggggttgggagggaaaagctgctgtggccatccgctggcctggcaaaatcacacccatctgagttaggggagaaagggacctctgctggctgttcrgctatgaagaggcccatgcggtgccctctctccgggccccaggctgtgtggagactggcagggggcagctgtgctgaccccctggactggccatcccctgcccctcttggcctttgcacccaagagcaggatcagctgagccagctgccccctagaatgggcacggtgtagtttggacactgccccttagctcagctccccttggccctgaggtctctaggctgggactgtgtgccaggcagccacgaggggctgcagcacagagcaggtgggagacccggctgctagctctgctcacctggccctctactagcgggttacgggggcttgctttctcctaatggggagagaccttcaagccctacctgggcagagggccagatcccaggacttgagcattgttggggtacagtccagggtgtggctggctcctcttcagcttgtccagatagggaggaggccattgggagccagmaggtgtcccttgaaggaggcccctctggactcttgaggcctgggagctgatggatctcactgcctaatggtatcaggctgtggtgctgcagacagatgcagggaggccaggcaggccaggtgccaacagctccccatgaagggctggtttctccggatgargtcagtaccagagccactggcactgtgctggtggccctgcagcagggcctgaggcctgggcatgcggaagattctggagtcccgcgcttagcactctttgatgtcagggagccccagcattggcaagtgcctcttcctttcccgcgtgccaggaaccagtctaaggccgactccagtttccaccggtggcacccctgccttgtctcctgtgccggctgtcatctgaccagygtccgtttcagacctgcctgccacctcctgcagaggccaggagcccctctacgctgctggtgcttcacatttggccagttctaagtrgacattcttttttcttgagacagtctcactctgtcgcccaggctgaagtgcagtggtgtgatcttggctcactgcaaccgacacctcccgggttcaagcaattctcatgcctcaccctcccaagtagctgggattacrggtgcatgccaccacacccagctatttttgtatttttaatagagacagggtttctttcttttcttttctttctttttttttttttttgagacagagttttgctcttgttgcgcaggctggagcgcaatggtgcaatcttagctcactgcagcctccacctcctgggttcaagcgattcaacctcccgagtagctgggactataggtgtgcaccactacgcctaggtaattttgtatttttagtagagatggggtttcaccatgttggccaggctggttttgaactccagacctcaggtgatccacttgcctcggcctcccaaagtgttgggattataggcatgagccatcgcgcctggctgagacagggtttcatcatgttggccagcctggtctcgaactcatgacctcaggtgatttgcccacctcgtcctcctacagtgctgggattacaggcasgagccactgcacccggtctctaagtggacattctgagaaacagtttaaacacaaccgctctaggtcaaagccactgaagataacctttcagccccctctctgtttccttcaggtcgagtcccagacaccagaagtctgaatttggagaaggctggggtagatactagccccgacactcagaagatcctggtggactccygggaagccacctctgtgccccacatctacgccattggtgacgtggtggaggtacggcatgcgtcccrggaccagggcccctgcccctgcctgctccaccacccctgctcgctgggctcyggctgctgccgtcctgtwggagagaaacgacactttctctgatgacagaggctctgggccaaaccccagggccagcctgtctggagttctggggcaacctggacatgggcctcggctctctgcctttcctttcctttctgtggtgggagtgtggatggtctaaagacagctgcaagcaccagcagcagacgcctgctgggaatggggcatgggtcagctctgcacgcaggcctcaacccctggcaggtaggctagaggcataggcttagaaatgccaccatggccttggggccgtcctgtccccacagggttgagaggcaggtctagttcgggcccacctggccccgccctccccgcctcagtatcctctggcttgcctctctgggcatcacaccggggcaggtcctttgctctcagctgctgctgctgctgtgaagtggagaccggtgccagtctttcctgggtgggggctctggagccctccttacacatggccccagtaagggactgtggtggtcagtcttgggatactgcaccctggcagcctcaggagtgctcggcctgtcctgcatgtgtccagcacctgctgctgaaagtggctctggagggtcgctgagagcttctttgtagcgagacctgtcagtgtctgcgtcctggggctgtggtaccaaatcaccacacacgggtggcccagaacaacagacatggattatctcacgtttggggggcagtagtctgaaatsaaagtgtcagctggggctgggtgcagtgtctcatgcttgtaatcccagcactttgggactccgaggcaggcagattacttgaggtcaggagttcaagaccagcctagccaacatggtgaaaccgtctctactaaaaaaatacaaaaattagccaggcgtggtggcacgtatctgtaatcccagctacccgggaggctgaggcaggagaatcatttgaactcgggaggaggaaggcggaggttaccgtgagccaagattgtgccactgcactccagcctgggtgacagagcgagactccatgtcagaaagtgtcagctgggccaggctccctcrgaagcctctggggtaggatgccccaggcgtccctcgggttgtggctatatcactcctctctctgcctcatcgtcatgtgacagtctcctgggtgtgtctctgggccctgatttgcctcttacagtttctctgcaattggacttagggtccaccctaatccaggatgacttcatttccatccttaccttaattgtatctgcaaagatcttatttccaaataaggtcacactctgaggctccaggcagaccctgcagggtcctgtagggcccatctagccgacccgattgtgtggacagagcatgtggctccatgtgcctcagccaccctgcagccccagcttgcttagctggatggttcagctgctcagtgatttctgcaagcgcagcctctgcctgtggaccatgtaggtgcagtggtctctggttgcagggtctgttgaatcctgtgggcgctgcaccctgagacagtgccatgtgcatctctgtgcacagygggaagcctcccttctgtctgggaatctgagttttccctctgcaagtgtgtagctcccaggctcctgtgttggaaactggaacatttcaaaccgttttgccagaaatgcatggcgcacacaaaggcattctttatttaaacattaaatccactctgtcagaaaggtcgttctgaatagtccaaagagttaacacccaaccagtggtcccttgagcggctgggaagagcctgtgggcggggcgggggctattgtttaatragatgttgtgtgctgtgcgccgcccgccgggatgtttccgtagttagtcaggcctgctggaatgcgcaggctgcgctctgagtttatctccacggatctctatgcatttctggaatgccaaacaacatctgcatttcctgctgccatggtgattggcagcccatcccagaggacggtgctggaacccccaaggctgggcacaccctgggacggagggatctccagcacagcgacattctgatttggaatttgttatggactgtgacgtgcagatcaagctgcacgtcaggagcacatggaacgctttggggtccctttttagccggggattccagtgaatgaaaacggtagcaggggctcttttgagcttggtcatggggcagccctccgaggtcagcaatgtgcagaaggggtttggagagaaggcttgagcatgtgagggtggcacggccagcctcatcagcagcggactcctttcccagggcagagtggagggcagcaaacaggagaatgagcaacctacctaggtccttgggatgcccctcaggaggacgagctctagggggaatgctgtacgtcaccatgctcggtgccagtgttggggattttctaaagggagatgcccactcggagggcaaagggtgatggcataggggctgcatataaccccggacatggtgctgacgtgscccccctgtgccttccccaaggggcggcctgagytgacacccanagcgatcatggccgggaggctcctggtgcagcggctcttcggcgggtcctcagatctgatggactacgacaatgtgagttctctagcaggacgccacgtgcagcctaggacaggctgagttygaggctagctcttctggggtgaggggcctttgtgcgctgtgtgtctgcatgtagatgtgggcatgcgtgtgtgtgcgcttatgtgggtgtgttgtacacaygtgtgtgtgcatgcatgggtgtgtggctcagttctgagagtgtggcgcaggcgtgggcaggtgggtcgcctactgtgcttkcagcctgctctgggcgcatctggtcctggtctgtgatcgctgctctttgtgtcacatgcagtggggaacttcggttttcggggcccaagggccctccctgactccagacctgctttcaggttcccacgaccgtcttcaccccrctggagtatggctgtgtggggctgtcygaggaggaggcagtggctcgccacgggcaggagcatgttgaggtgaggcctgggagcagcacagctgaggacagtggcgactccacgacctcaccccatgctctgggcggaggccttgtgagcagggtgccaaggtctctcctttccaggggccctgagcagtggctgtgtgtagcgggaagggacacgttgggggcagcctcasaagtgggggtgcctgggctttggcagccttggggygactgggcttaggtgcctctggtctctgccaccaygtgtcacagcagtgaggggaaggcccttggctgccttgttctgagggcaaggagaagccctgtggcccagaagcccccagccccaccccagccatgctgcaggggtgcccagcaccagcagggtcaccaccacggtgccacccgctcccctgctgaggtcagctgagcactggccccactccagcacacagcagcttgtccctgaaagcaccagggccccgaagatgcctctgtgctgtccccaccttgcagggccatgaatctcactctacccagaaaagtttctcccaggggcctccgacctctgcttccacccccaccccccccaccaccctgcacctcgtcttcctggactgcccagggtttctcccaggcgagagccccccgccccccgccccccaccacatcctgatacccatcctcttccagcttcttccaggctcaggcactcacccttgaggaaaggggttttcatcgagcaagcctgctttgggggtctgctctggcaggtggctgtggctccggggtggcctggagggatgcgggggctctgaagcctgccgggccgtggtagctggaagccttcggtgcggtttcatcttgctgccgctgcagcttgcaggcacccagagaaaccggagcctgcagcctgggcggtggggcctgcggcctttggggatgagacactgggctccagggctggccccttccccctgcaccccagaactctccatcaacaggacgggcctgacaggccagccttccccgaggcactttatttgctatttttgtttgattcatcacaagtgtgctgggacatatgttcctggcattttataatgttgttttatgtttcacaatgttgaatggccaaatactctgtttgttttcttttcaattctgtcttagttagaacaatattctctgaagttccattaattaataatggctgtacagcacatgtgagggccccactcattttttacttggccgcagccccggacacrctgtcgagcccttcaggggtgctgaaagcctttgtccaacagctccggctccggtgtggccacagcggccttgctccagtgagggccaagcaaacaccagggtgcctgagggagcccaggtggcctcctgctcacccattcttgcctccaccatttgttgtgggtgagctacgtccacccaggtttgctgtgcctggcctggctgcttggattgcctgatgcctgctctgctgctgtggtttacgggggtcccaggcctgggtgggasagggtctgtcctgcagagcatggctccagccactggctgcctgcacgtgagagggcctgcacacaccccgtggccagccaagccctcatccccatcccagaccagaccttcaggccagatggatggttcctgcccgccatgaccctgccttgcccatgcagcctgtgggagctgcaggtgccacgaggtttgtttgtcgcagcactgatccagggttggtatcctgtcctcaggtctatcacgcccattataaaccactggagttcacggtggctggacgagatgcatcccagtgttatgtaaaggtgagcatccctgtggcccrgggtgctgaggatgagagggagggtggcaaagagcctggcagggtgaacacccgaggactggccccacccatgcctcccaggcagggtgcagggtggatgcagggtggacgcaacccagccccctcctgggctggtggctgagatgtgcggctttcagatggtgtgcctgagggagcccccacagctggtgctgggcctgcatttccttggccccaacgcaggcgaagttactcaaggatttgctctggggatcaagtaagtcccgaggaatgyaggctgcgatgcgatgtgcagctgggtatccctcgagtgccggcagtcctacagtggagagctgctgccactcttgcggcatttatgtggccttcgtgggtttgcagcagagattcctcaggcccctcagacagggcgggttttagggggacaagaggcggttctgccccagccagacgctgttgagccagccagagccaggtgaggtgtcccctgtggccccgggtcgctgctagggcccttgcccacctggccaagcaccacgccaccatgagcagagtgccagtacctggagagccaccccagggctgctgtgtgtcttctggagctggggccattgcctgggtcttgggctcaggctgtgtgttttcggggtcccggggtcaaaggaagccatggcaaaggctctgggtgggttgacaggggtagttggaggttgggacattgtgcatggcctgagagaggtggctggctggatgtggggcctgggaggtggtggtgtggtgaggccaggatgcgctgtctgtgggtaaagcagagagcagaggcctaaggcaggactgtgcctagcaggggaggatggaacagcaggaagccaggccagggcaagccagggcgtggctgggtgggaggtgggctggacgagcactaggcatctgctgggagggaggtggatggcacccacgggtgtgggcaggggtcctggctgctggctgggggtcaggggacagtgaggagaccagcagcctctgaggccctcctcttcccgggggtgggatgctgtggacccccctccctgtgctgaccccgcctgcctcccccatcccccatgtgcaggtgtggggcttcctatgcgcaggtgatgcggaccgtgggtatccatcccacatgctctgaggaggtagtcaagctgcgcatctccaagcgctcaggcctggaccccacggtgacaggctgctgagggtaagcgccatccctgcaggccagggcacacggtgcgcccgccgccagctcctcggaggccagacccaggtatgcaggtggggctggctctgtttgaggacagggcatgtggcaggggtgcaggagccctggccatgggctccctccaggtgtacagcaaggctacacctgccacgccacccagaatgggtgctccatcctgtaaccaggccacagcggtgacaggcagaaggggaagttcccaggggcccaaacctccccgggggaccccagaccccggcctggccacagctgctycccacacacaggaggtatcaagaaacggggctcatccttagcagcctatcccaggtggatgttggcgtggaaggtgtcccgggtgggctaaagtcgggcatctcaagttgctgccccacagggggctgcagtcgggaagctggcctcccaccgaggcctcccaccaaggcctggctcctgcagagttcagcgcccgctcatttccctatctcccagaaggtggagacgctgccctgtgatggccggccctgcccagcctgccctgcacatctggttctgttccagctctgcagagccaggctgaccggggggcatgttgttcatcgtgacctcttctggggaggaagaaactggcaagggctcctggcctctgccccagggatgcctgtgccagagccccctcgcctcgtggtctaatagtgcatcctccggcctgggctgcagggcaggggccggggcagggtgggccctcagcccgtgccatccagcccacctggggcacccccatggctgtcagcccctcccagggttggggtgtttgggctccatctctcccccggggctgaggtggagaccaggcagagcagtgggctccccccaagatgcctgtggacaggctctagggtctgcatggcgccgaggggctctggggaggcctctctgggggtactcagggccccctgcttcaccgtggccgcctccccccggcggggccgcgctygatagggataaacaaagggcrtcctgaggaaactcttatcagaacattacacctcccagagctgttttgttaggagcctgctataaatttttatcatttcaaaatatttttgtagcaccgcgtcgctccctgtgacgcatcgccctggggtggggccattctctgctgggtttatttctcacccatctcccttgggggtccctgggtgtggcagtgggagacatagctaggctgatgtgaggggtgggtggctgacctgtgctgaccttcctgttgttggcaggatggctgcaggccaggtttggggggcctcaaccctctcctggagcgcctgtgagatggtcagcgtggagcgcaagtgctggacaggtggcccgtgtgccccacagggatggctcaggggactgtccacctcacccctgcacctytcagcctytgccgccgggcaccccccccaggctcctggtgccrgatgatgacgacctgggtggaaacctaccctgtgggcacccatgtccgagccccctggcatttctgcaatgcaaataaagagggtactttttctgaagtgtgctctgcctgcggtgtccctgatggtcccccaggatcgcccaggtgggtggggtctggccaggccaccaggcccctcttcaatcgtgagtagcttccatccagggcagcccagagtccgctggggccccttgaacccccgagcacaattccaagcagccctgggcagaggggagcagacttgcagtgctagggaccccacttaggcaggaggcggagccgccccacctgccccacagctgcctggcctctggcctgaagacgcccactgagggtttttcctgggaccctctgcctaggtctctgcaccttgaagcaagaagggcagcccagtgccagggaggctcttgggaggggcggcaacaccggctttgttctggaacagcccgccagcaggcaggcccatgacaggaggtagcagggctgtgtgaggctctctgtccccggatgtcagtcactttgccggttttccaccgtggccctccaagtcagcttgtcggctgcgtcaggctaatcctgtgcattgaggcttgatgggctggggagtgcctgtcagtcactgccgagagacagcgctgacagccatggccgggccctgcattgtgctggggctttagctgtggctaatcgcgtgtcttccttaagaaaacatcacttagtctgccggcccggagccgtggatgggaccctgcttgtcagcacacagaggaatgcctttgcaccttaatgggcctgcaggagcccgacttgctgtgtgaaacgtgcgcgtgagctctcagacgcccacttaagatgccaagtgctgggccaggccctcccacaagtgcagctctagatcagccgtgtcccatttaacacacggctggtggcatgcctgggccggatcctgtgggtggggctcgcctctaggcctgcaagttttttttgccgtggaggcaccgccaggctgggaggtcagcctacacctgctgcctgggctctggggggtggctctgggcagcagccaggaagggggcagagggcctgtggattccttggccctgggatcagcccctgccagggagcatggggaaagcttgaaatggccttggtgcttttgtggtgatggagaggatgcagctgtgtggagcccgcactacacactgggccgcattctgccgggagggcctcttgcctccctgtctgcccagccgaccaggagtacctgttgctggtggcctgagagccacccacacgtccatgtccccactggcccctccaggtggttttctctgcgtgccccttcttcccagaacacaccgtgtaccacacacctgctctctgtgacctcggctctcccacgctgtgtggcccattcagccggcctgcacatcccctaggagggaccaaaacatccaccacacacatcccaggcagccgtgggtccttgggctcctgctgcacaggggctcataccctcctggtaagtggtaggcaggggtccagcccagtttacaagcaatgggtgctgcaggtgaagagtggccacaaagaggccagcactgctgccccaggccctctcagggccggtgctgaactggcaggcacctggctgcagaccaggcccaggggaccccgcaggcacaggccatccccacacctcactactctggtgggacactggcccagagcccccacccaggcagctgcacagccagggcaggaaccagggcccagcagggcaatgtgggcaaagcggccgctctcccggtctcccttgcccagcgtgggaccggtgtgctgggccaacagtggtttcgatcctgcgtctccctggagacggcccagggagtgcagggtggggccagagccgggtgctctccgcctggccccgcggccgccrtccygccgccttcacatgtttttatggtgcaatraaaatatgactttaattcctcagattgttctgtgtaacctgcaattacccccggcgacatcctccacacttctgctgtggcaccggatctcgcaaagacgtgggagcaggagaagtgggcggggggtgctgcccagcgaggctgagtggcccctctctgccacaccctgcatggggcagtgtcaccctctcctgcccccaacacccctgagtgacattgggcagttccccaggccccctgggtggtccacaygcaggggaggggacacacagttatggagggcttcgagggccacagcggggcagcaggggagggcagggcctggcagggctctgaggagtggacagggggtacagcaggggtcatcagctcaaggggaggggtaactgagatgctcagactgcagccccctccctgagcatgctgcacccttgcttggccctagcctcacttggcagccatcgggcacctcggccctgctctcctggccgtgaggtgaccttagtgctggctaggccctcaggcagggctgcccctgtgagagcagcagcrtcaggtggggctgcagtttggtggggctgcagttgagagcacctgtttcctggcctcgggtttgggctcctcccacagggtcttggcacatgagctcacctcggctgacacctgcttgccttacctggcccacggccactccagccccagtgcagcagcttggaggtgccgccagtgcctgggcactgggccctggtcccctccccaggttgaagcaggacccagaggcaggcctgaggcccccacctacccctcacacactgggcaagaactggaggtgacccaagacctttaatgagggatgccctgaggtggctgggcagtgtgctcatcggggcagggccatgaggccacactaacccctccaggccctattgaggctccaggtgcctgggccacctcgggttgaggctccatcctagtggcgtcaccgccccatgctcacatccctccccaagagagcacaggttggcacctggcttcagtgggtggcatgagaagcgtgttggtgtctgcgttgggctggtgggtgggggccactcctgcctcccagagctcagagccacctgagcctcctggtctcggtcccaggctgctgccccaccccgtgtccctctgggagccacttctcctccccagggtccctgagtgcccctgtcctgggcaagagatcctcccgcccagcctgatgagacctgctggcctctgcccacctgccctcactcatcgccacttcccacccttgggcctagtcagggtccaggagggttggtgtgggtcattcattgccagacacggggatccccaccctctggagcaggaagcagcagggggtctacacccaaggccagcgggccagcatcagtggccagggcaggtggtgcagcccctacaggtattaaggcccaggcacagggcgcccyatcaggaagcatctccctctgaactgcctctccatccagatgggcctgggccaggtcttactcttgggcagtagaggaagatgccctctcctggccccaaatgcacaggctgtggacctcccagcccatgtgggggcctcagcccaactcacatggggcgaagactagaatgggagtgtgctggggtggtgtccctctccacaacccagctaccccccacctgggactgctctagcagggcctggacgtgggcccccatgccaccagggaccccgcagcccatccacccagcaccttggcccctacttttgcctgcttggccaggccagagagccagccagctgctgagagagacttccagatcccactccctgggcttccatggagccctaggcagcagccccacgcccgtcctggtagggccactggcccacaagacccctcccatgggcccccaggctgcgtccttgggctagcccacctctgtctccctggccctcccctccccagccctcccagcggaagcccagagctcaacagagcctggcacgggagcatcctatgcccagcctggtctccttcctctaccaccatcttcgagctgggctctctggctgggcactgcatggccctgcaagctgcctgaggttcttcctggaccaggcaggggcrtaaagaggtacacgctggcgtcctggctgccaccccgagcagaaggcaggcagggaggaactggctccgtgtgctcccatgtccctctgcgcccgggctgaggggcctccccsctgtgcttggggcttctgggctgtgctcttccaggcaggatccagtgctccagtgctgtgcagatcccagctctgctgtgcccctgcccagaccaggtcccacggggccggctgcagggagccgagctgctggtgggctagtgaaggaaggagctcagggttgggggcaggcgggcaagggcctgtccagccacaacctggaatgttcagcttgggaaatagctggacagaagattcttcaacaggcaagagctgccacgagactgataacccaggaaatggatgtgatgcagccccgacggggttctgggaggcagagtgtgggagggatgggaccccggacacctgggcgctccttgggcctcacctgcagcagccccctgagcgtcagccacagggcccacctccaagcccggcaggcgtggctggcatcatcgatttctgttcccagaatccaccatgcagggtgaagtttggccaagagttgaggacttgccacagacaccctgcgctccgtcaggcggtgacagcatccagctcgggctggcactacgggtcgtcagggaatacaggcgacagcagccgagactgcctgcactggccaggagtggaggacgacaacccacacggtgcctacgccctgcggccaagtccatgcactaaatgccagtgattgctgctgtcaacaccctggatgggtcttctgggcaaccctgggagagagaggcaagactgtgggcccattttccagatactgctccttaatccctgcacacttgatcatgggaaccgtcagggccgcagcttcagacctgggcctggtgcccgtgggcccttggtgctgtcctgcagatgcagccgagcctcactcctgccgcaccctgaccacccttctgtccctcatcttcccctatgcctgctctcgaggcgtggcctaactccctcaaatctccctgacctctggtcctgccgccagagggttctggagccctgcttgtcctggcccccagccaatcctgtgtgcctatgaggacagcgagggggccgtctgtggggcccagcaaagcatcttaggcccgagcctgcctgatcccagccctgacatggtgtacggtgctcaggttaccctaatcccaaaacccaagctggcgttcccagagccttcccttacttcccagtgagggggacaagcagagactctttggagacagaagagaacttcccccgctgtgccttttggttggtagctgactctcacaggggcagggcagagggctgggcacccacaggagtgaaaatccaggcccaacaaacccaagtgtgttcaggacatggagatgcaaagccagcggtgccggtgaagcaggaccgaagggcrgggcagacctggctcaagcctggcgaggtcctggcctctagggtttcgtgggacaatcatggggccttgcggttccacagaatggaacttttcccccctaattaaaactggaatctttttggcttataactggtgatcaaataacaccaaatgcttgagaataaagtggagccaccggcaggaggtggtgtggccttgtaactcagcagctgggggtgcagccaactgtgcccagccctctaccctggctgctggcctctgacccagctgggactcccagggccacccctatactaggcaccccagcttggggcgggaacaccccacaggctccctttttgtgattatataggcgaggccatgcatgctgaggactgcgaaggacgctggtgtcttctgcatcatggtctccctgaagcagagttagttcctgacctacaagggtcacaa

SEQ ID NO: 93971 - DNA, 17214 bp, Homo sapiens
aattccaatgtgattttttttactgggtcctaggtttaacaatgctttatcataatgaacttagtgattgatgatttcatagtacataagaatgtgtttccctgataagacttgctatccttgagtggaaagaatgaaattcccggttgcatagaaatgtgtacacacacacacacacgcatgcacacatattttatatgtatcatcacgtgtgtgtgtgtgtgtgtgtgtgtgtgtgtgtgtgtgtattttctggtttagaccatctcagtaggttcacatttcagtggcagaaaatgtatgaaaaaaagcatggtaaagcctcatgctcattttggacgctgtccttggcagaactgaaaagagacctcatagaactctgacagatctagacagaaagctgatgccctttctctctagatcttcccactacagaatgtctaagataccaatggtcttagtctgttcaggctgctataacaaaaatatcttaaactggatggcttataaacaacagaaatttatttctcacagttctggaggctgagaagtccacaatcaaggtcccaatagatttggtgtctggtgagggcctgctccttagttggagcaccttttcactgtttcctcacatggtggaaggggtaaaggccattctctggggcctttgtaataaaggcactaatcacattcatgagggcggagccttccaaatcatctcccaaaggcccaattgttaatataatcacattagagattaggtttcaacatatgaattttgaggggacacaaatattcagaccatagtaccactgacaagaaggaggatataattggaactgattattcatctcccttgaagaatccatcagaactcattccatcatgcctttaacacatgaagtccaaattcccaaattattatttgtcttttgtgtgttcttctttacactctctaatggagccaagatcatgccactccctgaccctgaaaacctgtccattatgttctttgtaacttaaaatctccaatcaagagaatcccctagatcaaatacatcttctctgagtttctctgtattttcttgctgtaatagaaaactggctgtcctccaagtgcactgcgtgcactgcttcccttgcagcagtattctttctttcttttttttcttcttcttttttttttttttttttttgagacagagtctgactccgttgcccaggctggagtgctgtggcgtgatctcggctcactgcaacctccacctcccaggctcaagtgatcctcctacctcagcctcccgagtagctgggactataggcatgcaccatcatgcctggctaatttttgtattcttttttgtagagacagggtttcgccttgttgcccagactggttcagaattcctggcctccagtgttctgcccccttcagcctcctaaagtgctggtattacttgtgtgagccactgcccccagcatttgcaacattctttcttgcattaagtacattcatatcattgtagccatcaccaccatccatctctaggaccttttcttctgcatctctcttacctgctagttgtgttctctctcacctgtcacatcccactggacagggagggagcaagtgtcccttccattaacaatttattgaacagccccagttgattgaagcatatgccatcagatcaaactgaagagcagactaaacccctcaaagttatagtcacctacagatccttagtctcaacaaccagattttagcacttcagtcactaattaggtttataaaattaaattcaaagtttagtaaaagttaactcttttttcgttcttctggattaaatctgatggaagaaaatctgccaggagaaaagacaaggagtgtttcacttcttctctatcccttgccaagtgcttttccccaaatactaggttgcttctggttcctgcatggttgaagtgtgggtatcagtggctgcaagagaagcagcaaatgtttacttgacaggtgtcaatctgaaattggctctttaaagctgactttcttcttgtgaggggtttcatggcaaaatgaatgaaaaagttgaaagacaacaagaaactggaaaaaaaaaacccgtgttacttcatactataatatttggtgtaattaccataatatagttcacaatatatttaagaaactccttgttggtcacatagatgttgtttctaggattttctattacaaacatagtagcagtgaatgcaattgcatctataactttcttcattcaagtagactttacttttcagagcacttttaggttcctagcaaaattgagcagaaagtagagagacttgttgtatactcccttctccctgacatcacaaccttccctgctattgacatgtcccaccagagtggtacatttattataactgatgaacctacatggacatgttcttattatccaatgcctatagtttacattagggttcactcttcgtgttgtgcattctatggcttttgacaaatgtataacggcatgtatccaccattaaagtattacacagaatagttccactgctctccaaatccactgtgttccacctattcatctgtccctctccccaacccttggcaaccactaaatttttttattgtctccatattttttcttttccagaatgtcatgtatagttggaattgtacaatttgtaagctttacagatagtttatttcacttagtaagatgcttacttaattctcttagtaatattaagtttactccacatcatttcagtgcttgatggctcatttcttcttagcactgaataatattccattatctggatgtaccacagttcatttatctactcacctactgaaggacattttggttgcttacagattttggcaattatgaataaagcttctataaacattcttgtgcagatttttgtgtgggtgtaagtttccaagttggttgggtaaatgccaaggagcataatgattggattgtatggtaagagtatatgtaattttgtgagaaattgccaaactgtcttgcaaaatagctgtagcattttgcattccaattggcaatgtatgagagtttcctgttgctacacatcctcaccaacatttggagttggaattgttctggatttgggccattcattaataggcatgtagtggtgtctcattgctgttttaatttgcaattctctaaggacatataatgttgagcatcttttcatatctgtatatcttctttgatgagatgtctgttcaagccttttgctcatttttaaatctgttgttcattttcttgttgttgaaatttaagagattttgtatattttagataacacttctttgttagatatgtcttttgcaaatattttctcttagtctgtggcttgtcttctcattttcttaacagtgtctttcacagatgagatgtttttaatgaaatccagtttgtcaactatttctttcatggattgtgcctttagtattgtatctaaaaagtcatctgcttgtctaaggtaatctaaattttctcctatattattttctaggagttttatagttttatattttacatctaagtatttataccttttttgttgttgttgttgttgttgtcggagagggagtctcactctgtcacccaggctggagtgcggtggcacaatctcagctcactgcaacctccatctaccaggttcaagtgattctcctgcctcagcctcctgagtagctgtgattacaggtgcacaccaccacacgtggctaatttttgtatttttagtagagatggggtttcaccatgttggccaggctggtctcaaactcctgacctcgtgatctgcctgcctcggcctcccaaagtgctgggaatacaggtgtgagccactgcgtctggctggtatctatacctttttacaatgtgtggaattatgttgctttccccactgcttcactagacctggctacttgcctgaaacatatcagatttgttgaacaaaaattcaagtgtatgtgtgtatatatgtatgcatgtattagtatatatattttataagtggaaaaatgtagatctagttttatattttgaataataaaaatagctagaaaaaataaaatctcagcagcatgtagaaagaattcattatatttaaaaatgcataccattataatgcatatttttgttactgtagtagaagtctgttataaaatgtagactagggaccaaaataatgccaaaataatttttccataggctagctagaaaaatagatgattgtgtatcatttatatacatggaaaacataatgaaaatctcctagaagaggaaatttgtaacagtattttactaaagtacaatattttgtatttttaggccctttggctctaaaaaatttattgtgatatgacattttaaaaaggtgttttttgttcccaagggtgtcagtttattaggcatatatatacgcaatgtgcagtcatgaccagagggaggtaaagaataatatttatggagagtagatattctttcattttccctgaacaacaaataaagaatgaagaagatttgcctttatatttttgtgggggagtgggagtcaaattaagatcccatgattagagaagagtgatgggagaaaaaccatctctgatagcttagagattcatctggtgctataatacacactccacatgaaggcaattgtctcaataatatccaatttatttaaaagagtaaattatcgttcacatttgttaatttaaaaattcagtgtacagagagcatacgacttgaactcaagtttctttacaaacttggggtgctatgttgtgagagttagcgtacaattttggttggtgtctttcctgaatttagtacgttaaataaagacaccaagaactacatgagaaacaatgtatgattcttaaaaagaaactgagtttaattatatcagagaaaaatctgtttaaaataaattcctttatttaaaaaaatccatacgataagataattttgatatgtaactgaaaccatattgctttcaggatgagatcttgttggctggaatgcatcaactattagatagtccttatattctgggaagattctttggcagttttcgtcccaacagactagttaaaggggcctaaagagacaagttttatttagggtttaactgctgaatatacaatccagtttctttataggaaaaccactggagttaaagaactaataggattttaggcttgtttatatgcctaagaagatgatagcaccaaaatccataatcaacacagggtaattaacatttctacttgttttttatttcagcctatgctagttccaagggtaactgctctctgttttaaaaataaacatttgaagccagtgcatttcaaattgcatgtaaagtattacttactgttagtacagttagttatttctttttgttctatttaatattagttaaaatcccaatatttgttaattttcaagtgggcatgttcttggagtcactttgtaagtaatcaataaggagatatgacaatccattcagacttcttttctagttcctcttagagccagtgaaggcttgtcagtacaagaaggtttgggttagcgtattcagaatcataggaaattaaaaccagaatggctagcagctagagtttgcatagctgacaaatgtgtgaaactttttatagtttttattgagtatatatttttttcacatttcactataaattggcatagatattaataagcctcaaagatattttaaaatatttggtctattcattgtataccacaaaacttaagagacatttgactccattatgtatgatattttgcttattattttcaaggagactgctgtaatgctgaaaacctcaagccatgtgtaacccatgrgtggcgtggttaggagtgctaccactctttatcctattaactcaggcagccctcaaaccagcaatgcctccggtgatcaagagccagcctttcaacattttctgggcagccccaacaatgtattgtatgccttccttcaacgtggatataaatcttcaagtatttaacattatatcaaatcctttagagactcagagtgggtcaaaaattgccatattttatccaaatgaattagggtattacccttacttatctcaagatggaaaatcctttaatggaggaataccgcagaatgtgagcctttctgaacaccttaggaaaactgctgatgacattggagaaggtgtcccttggtggagatcagaagaacttgttgttattgactgggaaagttggaaaccccaatgggatagaaatcagggcagcagaataatatataaaaaccactctttagccttcactagaaaccatcatccttattggtyagaaatgaaagtggaaacagttgcccgagaggaatttgaaaatgctggaaaaaatttcatgaacattactctcacattggctttagaaatgagaccaaaatgtttatggggcttttatctctatccagactgctacaattatgattacagaataaatccagagacgtacacaggtaattgtccaaattgtggctgtgggaaaaaagcgcagcactttatccttcaatacatttggataaaatactgaagtcaagcttaaatgctttgaaatttgttcactatcgagttagagaagccatgagggttgctgaaatggctagacatgactatgttttgccagtttttattttttccagaccattttatttgcatagtactgaagctctgtcacaggtaaggaaaagcacagtcactcacatttaaaaaaaatggaaatttggtagaataactatataaagcctatacataaatgttttaggatatttattttcccttagcaatacaatgctgttctcttattaaacatgtatatttcttcaaatgtcaactcaattctgaaaaatgtcactgacaattagatgtacacttaacacttttggataatgattcttaccagcttagcattcacaggagtttcctacagaacagaggttaaacttgatttaaataatgtaacagacagattaattttaaccagagagaaattttagaactaacttcttaatatgaaaaggtarcagcaattttccaaatcaaaaacgtgcaacatagagcttagggtaaattattaaccaactacatttctcattatattgcatttgtatgttttaattagctaggctaactaaaaaaattacataggttctcttgattttgtctttaacagtcaacaatgcaatctagtggttattgtcaaggcattaaaactggtttatataaggagacagatattgtctttagactgaacacaaagctggaagcctacagatgtggagatgagcttgtttagaagataataagtttgaagacatggcaagtgtccaaactttaamtagattgtcacataggacattmttgtaaggattcaatcattggataggtggctagataagaaaatcctcaaatctccatctatacctgagagccaacaatactttatgccagtacccaacacagaagcagagctgttgtatggacaatacacagctcacttagaccacttargtttgagataaggccatttaaaagcagtagcaattcttcctaaatatttcagaataaaatccaattattaattagacttgacatattcatctttgcaggattactcagtattattcagaatgggctattcattcaataagtttagaaggaaaagaatcatagcattatgacaaaaatttggaagaatctcatgggcactaacccatctcctacccaaataaaaaccctttcttatactttaacactttttgatgggggcacttcttatattagaagggaaactgccatttgggggaaatattaattcctagaaagtttttragtatatttaatctactttgcctcttaataacttcataccactagttctaattctaccttctggtgcaacatagaatacagcaaatccttctttcaaaagccagttgtccaggtattttaggatatcaggcctgcctaccaaagtcttcttgctaaggtattcctcaagtgatgccagctttctcaaatcattttactatcttaaatccttttcagaaaaataacctgggttatatttattcattgagaaattcttgagtgcctaccttgtgtcaggaattacatgttattagtaataacagtagaaaataataataattcatgcagtcaaagagttcaccttgagagaaaatgggagaatgagatgagccacattttcataaaagccttgttcattgctttcctattttttgtactattggactttttaatcttttttatttttaatttttgtgggtacattagacttttaaagtaaattatatgctaagtatcacctctgagctctacttgagaaatcaatagactgcattctctactcaccaaaatatatagaatcacctgagcattatattgaattgttttaattgccttccatgtatcatatatcaaaaaacagtatgggtttttctcacctttggtctaagtaacataactttccaacgcatttttttttaaaccagtcctgtttggtatttgctttcaggagtgtctcaattaaaataagcgactacatttaggtttaaggaatgtgatattagtcagtataatggaagaatgatttcctttcttgttgtattacttagacaaattgcagaacataaatgccagtattgctgaaaccttcctataacgcaggaaagcttacagtggcgtgacaatttactcattgcagtctgtgagcactccacctttgcactggatctctgactctccataccttgtaggggagaaaagaatgcagattgcaccattggtcatcccctttatctcccatctctccctatttcctacttctttgctcttggcctatatacattagcataacatcctcggtttcttatctttatgaactgtaatctatatagtcacccaatttgaaagtcacttggctgcctcccttttcctctttccattatcggatgggtaactaaaacttatccatctttatttccaaataactcttcaatctattccctctgctttacaaggatttacattgcctttgttgaggcatcatcatttctcaccgaacaatttctatcacctcctaattggtgttcctgcctgtactatcttgaccttcccctccaatgcattcttcttcttttttttttttttttttgagatggagtctcgttctgtcacccaggctggagtgcagtggtatgatcttggctcactgcaacctccgtctcctgggttcaagtgattctcccacctcagcctcctgagtagttgggattacaggcgtgtgccaccacgccggctaatttttgtatttttagtagagacagggtttcaccattttggtcaggctggtctcgaactcctgacctcaggtgatccacccgcctcagcctcccaaagtgctgggattacccatcttccaatgcattctttatatgcaaaaagaaaaaaaaaatcaaagttgcaaatttgtgtctttccagcactaaatatttaacatttatttatgtatttatttatttgagatggagtctcgccctgtcacccaagctggagtttagtgacaggatctcggctcactgcaacctccgcctcctgaattcaagagactctcctgcctcagcctcccgagtagctgggattacaggcaggcaccaccatgcctggctatttttgtatttttagtagagatagggtttcaccatgttggccaggctggtctcgaactactcaccttgagtgatctgtctgcctcgggctcccaaattgctgagattacaggcgtgagccactgcacctgaccagttgtcttaacactttaaaacagcatttttctctttgtatttggattctgtttatacatagaaattcatatgtttttactttccaaattctgtgtgctttaccacaaggaagtactgggagttctctggatggactgtgattttgcctggatctaagtctctgctcttattctkcctgtggatataaaactctgctctctctagactgtcttgtgaattcrtactcattctcaagagtctactgattctcattcccaagagtcatatgaaatttaacgtgttaaggaagccttcccagactcttccatgaagtattaagcacttctaatttatatatgttttgtgagtgctactaatataaaaattattatgttatagtcacttgtttatatgtctgtctcaaccattagactaaaaagcattccttcaagaaaaggaattgaaatctatttcatttttatattctcagtgtttagaatattgcctggaacattgtaaatatttctcaaataaatctaagaatccaaggcagtatcaccttttccaattctggtatggtcttttgttttattttttgtatgatagctttatttaaaagaaatgcctttttttctgtgtattaaaatttatattttaattgacatatacaattgtatgtatttatcatatacaacataatgttttgaggtacatatacattgcagaatggttaaatctagctaattaacaaattcatgacctcacagttatttttattttaagaacatttaatatccactctctcagcatttttcaagaatacaatatgttgtcattacctatagacaccatgctatacaatagatctcttgaacttattcctcctatctaattgtaattatgtattctttaaccaacatctcctcaatcccctctccctcctaaccacctcagcctcgggtaatcaccattctactatctacttccatgagattaactttttcagattctatctgagtgagatcacgcagtatttaccttgtggtacagtcctttgttttggaaacaaagatatcattattaacgtgttccttaccacagttgagggattgagtcttattattgcattatcactgacaaaatttgacttggtggaaactactcctgrtacctctcttttctaggaggacttagtgcatgcaattggcgaaagtgcagcattgggggcagcaggagtaatattgtggggaggatatgaatattctgcttcaaaggtaagcaatgatttctctgtcagcaacttgaatatacttttgagattggtttaaaaacattttttttttcgcatcagagtcaaatggttgctgattatctgcttacttgaccttagtgaaattcaaaaagtacagggtctaacattgagcacctactccataccagccattgtggttagtagaagggtagaaagagcacaatcattctaatcagacagctaagtgagaaactgatgtttatgtcctaggggtgtaattttgagcatgttagttaacatttctgagtctcagcttctccatctaaaaaattagactaaaataaaacctcctctgcaggattttggtagattaaatggcataatatatatgtgacaaacaaaaagtaataaattttaaaaatgaataattatttcatttgcactgagggcagattctccaaaaatgataaataattctttttttttcttttttttttttttgtgaggcagtctcactctgtcaccagactggagtgcagtggcgcaatcttggcacactgcaacctctgcctcccaggtacaagtgattctcgtgactcagcctcctgactagctgagactacaggcatgtgccaccatgtctgacttatttttttgtatttttagtagagacagggtttcgttatgttggccaggctggtctcaaactcctggccttaagctatctgcccgcctcagcctcctaaagtgctgggattacaggcatgagccactgtacctggcccaaaaatgattctttactttgctgattacctattatagaaatgcatgtgggagaaaaatctatttgtatataaaggtttattaacaatctactctgttctggctgggcacggtggctcacgcctgtaatccctgtaatcccagcactttgggaggccgaggcaggtggatcacttgtggtcaggagttcgagaccagcctgaccaacatggagaaaccccgtctctactaaaaatacaaaattagctggatgtggtggtgcacacctgtaatcccagctactcaggaggctgaggcaggagagtcgcttgaacctgggatgcagagttggcggtgagtcaagattgtgccattgtgccccagcttgggcaacaagagtgaaactccatctcaaaaaaaaaaaaaaaattaccaatcccccttttattataagaacacttaatatgaaatctaccctcttaaattttggagtgcttaatatattgttaaccatagacactatgttgtacaggagatctctcgaacttgtttatctagcgtaactaaactagcatatctcggacttatttatctagcataactgaaacgttacaacctttaaataacaatttctcatttctcccaccctcagccccttacaactattactgtgttctttgcttctacgagtttggctattttagatacctcgtaagtagaatcatgtagcatttgtccttctgtgactgccttagttcacacagaataatgtcccccaggttcatctggttgtcataaatgacattatttccttcttttaaaaggctgactaatatttcattgtatgtatataccgaattatccttattcatttatctgtcaacagacacttggattgtttccatttcttggctattgtgaatagtgctgcaatatacatgggaatgcagacacctctttgagattgcaatttcacttcttttatatatccagaagtatatatgcatttatactgaatcatatagtagttattatagttagaattttttgaggaatcttccatactgttttccatagctcttgtaccatttaacattcccatcaacagggtatgggggttcccatttctctacaacttcaacacttgttatcttttattttttaaataatacccatcctaacaggtgtgaggtgatagctcattgttttgatttacatttccccaataattatgattttgagcgtcttttcatatacctgttagctctttgtatgtcttctttggagaaatgtttgttcaagtcctttgcttaatctttgattgggttatatatattttttgctgagtcatagaagttcattatatattttggatattgacctctatcagacatatggtttggaaatatttctactattctgtaggttatctcttcatactgctgtttcttttgctgtgcaacagcttttcagtttgatgcatcccatttgtccatgtttctttttgttgcctgtccttttggtgtcatgtctaaggaataattkccaagaccagtgtcaagaagcattctccctatgttttcttctaggagttttacagtattcggtctaatgttaaataagtctttagtccagtttgaattgacttttgtgtgtggtataagatagggatccaatttcatttctgggcctacagatatctagttttcccaactccatctcttgaagagactatcctttctctgttgtgttcttggcactcttgtcaaacatcagttgatcatatatgtgtaggtttacttctggactctctattctgttcctgtgacttgtatatcttcctttataccagaaacatagtgttttaattattgtagaattgtaatatatatttaaatgaggaaatatgaagcctccagttttgttcttctttctcaaggttactttggctgttctgggccttttgtggttccatataaagtttagttttttgttttctatttctgtaaaaaatgccattgggattttgatggggatagcatcaagcctgcagatcactttggatagtatggacattttaacaatattaagtttttctatccataaacataggttatcttttatttatgtctcttttaacaccttttatcaatattatgtagtttttgatgtacaagtctttcacttttttggttaagtttattcctaagtattttattatttttaatggtattgtaaatggaattgttttcttagtttccttttcagatggctcactattaatagatggaaattcaactaatttttgtatgttgattttgtatcctgcaaccttactgaatttcattattacttatgacattttttgtagtttttagggttttctatatatagaactatatcatctgcagcaagaataattttaaattcagattcatttttatttcttgcctaattgctctagctaggacttctagtactacgttgaatagaagtggtcagagttggctggatgagatggctcatgcctataatcccagtactttgagaagctgagggatgaaggttgcttgaggccaggagttcaaacccagccttggcaacataatgtgaccccatctctacaaaaggtaaaaaagaaaaaactagccaggtgtgttggtgtgtgcttgtagtcctagcttctcaggaggctacagcaggaggatgacttgaacccaggagttcaaagctgtagtgagctatgactgtgctactgcacttcagcctgggtgacagactccatctgttaaagaaaaataattaaattaaaatgaataaaagagaagtgattagagtgagtatccttgtgttatttctgatgttagagaaaaagctttcaacttttcatcattgactatgatgttagctatgggcttgtcatatgtggcctttatatgttatggcacattctttctacacctattgttttaagagtttttactgtgaaggggtgttaaatttttaaaaagtgctttttctgcttctagtaagatgatcataggatttttatttttcattctgtttatgtggtatatcacatttattgatttgtgtgtgttgaatcatccttgcatcccaggaataaatcctacttgatcatggtgtatgatacttttaatgtgctattgaatttgggttgctattattttgttgaggatttttgcatccagtttcatcagggatattggctgataattttcttttcttacagcatctttgccttgctttggtatcagggtaatgctggcatcataaagtgagtttgaaagtgtttcctttgcttcaatatttttgaagagttagagagagattagcattattgttttaatgtttggcacaattcactggtgaagttttcaggtccagggctcttctttgttgggaatttttggattaatgattcagtctccatgttcgttattggtctattcagatattctatttgttttttcatttttagttctagaagttatatatacacacacatatatatttatatatatacacatatatattttatatatatatatacacacacacacacacatatatttatatatatatgaatttattcatttcttctaggttatcccgagttacctagatagtacatacaaaataactctattaattttcacaaaataactactacttttctaaagctgcctttgagtatggtcatccatcccactgcttaagtgaaaattctgagaccacagctcttcctcacttccaggcattaacaaacagtctcagtttcaggaattaaaatgtctagtcttataaaatataaaaatagcaatctcttttcattcagtgtgacacaagttaggatgtcagcattgttaagaacaggagtcctgtgatgagactgcttgagtttcaatgctcactttttgtcacctactagctgtgtgaccttgatcaagtaattgacttttcaatttctttatctatacaatgaaagaaataatagtatctctcctataggacttttatgagaattacactattgatatatataaagcacttaaaactgtacatggcagatggcaagtgccatgtaagtgttgattattacttcttacctctcttccccacacaccaggcttggatctgaggtgtggagaagaggggtatggtgagttcttttgttcagctaattcaaagatgggtttagaagatggggatgaggatgagaaaaggtggcaatataatttttttaagtttaatgacattagtaattatctttcctgctgaaagccttttgatacggctgccatttagtggctgactttttcttacatgaagcgctgctgcaatttggttacaggaaacccccttctccccacaactctcaccaccacctccttcacccccgcacatgacaccattctctgctttgaacaatgcaggctttagctaccaccttgaaacttcccctttacttcttccccagaagtacctcctacattccctttgcccttggacttttcaggaagatgcatgcctggctacctgtgtaaaatccacttggatcatgaaaatactcctgtacccttgttctgttaaattacatgaaggcaggccactcccactgctgtcatctctcctcagtgtctttattccaagaacctgtagcagagctttgcacataataatgtgtgctgaataaatatttgcagagtgaataaataaacatgtcagcctccaagctcccagtagttcccgtgtggttctaggacagtgctctctacttcaaattcctttcacagaacattccttctgccctgataatttctagccatttatatatgctggagatgggtaaatgtctctaactccttagttgtcaaccccactgtcttcagctttgggtttcaggtgaaatctctctttctctctctctctctatatatatatctatgataaatctatatatataaaatgtatttagatttttataaattatatgtaaagttcctgtcttttttttaaccacgttacatataaatggtgtaacaggtttcccctaattgaagcatgtatttgggatggtctgattaaatccaarctgtcacatagacaaaattctcttttagattcctgatgtaaatctttaaatacagatcatctttccttagagcagctgaaatagccatgtaatcacatccaagaggctgacaaatccaactctagaagcaataattaaggttgat

SEQ ID NO: 93972 - DNA, 40905 bp, Homo sapiens
tcaggtgggcatcatggtcctaccgatacgtgatgtcacccccagcagcccagctgtaaaattcctctttgtactctttctcttcatttctcagccggctgacacttacagaaaatagaaagaacgtacgttgaaatattaggggcaggttcccccaatatctggcgcccaacgtggttttctttttcctaagtgcatgtgggaacccgattccctttggtaggtgcggagaaatgttcatcggtccagtccacagaaatgcttgttyggctccccaacgattggtgagttgtctgtgtattctccggggtaactatgggtcacgcagagtctaaacattatgcttatctctgctatattaaattcctgttaaaatgggggagttcgggttcccatggaaaatatggtcaccctattcagggcagtggaagaacactgtccttggtttcctgaaaagggaacgttagatgtggaactatgggatcatgttggtgcaaaattccgagaactggtcccaacaggaaattatgttcctgtcactgtttggggtgattgggccttggtacgtgccatcctaatgacataccaatcccgtgacaccctgcagttaccacagttttctgaatctggccaccctctacctcttcctcagctttcctctcccactcggccttcattatctgctcagcccctccctttgcctactcctcccccacctgacgatactgaggattcaatatctaactccagtgactttggcttaacatcaccccctgatgatcttatttcttttcacgaagagccgacacttgtagctcctgcggccccaactcagacagcccaggaccatatctatgctaactcttccctctccaaacctttacagtctttgcctccggagccatccaaactacaatttacctgtaattctgcaggccctcccccatccaccacagcccctcaccctcctatcattttggtccctcaaccggtcactttgccatccactcaacctgcttctctgtacccttcttcatgcagggacacccctgccactctggttgtgcaggactgggccagtaatcaccagtatgcttctgcctcttctgctcccccaatgcccctttctcacactcttataccagtccgaccccgtcaatctcagtttctcttatctatacatacttttcctgtcacttctatgccgactctatctcatgtgcctgctcttgaaactttcatgcaatgcttattacgccaaaacaaacaagtagattagaggcgtgggcttattcggtcatgctggaacctcctaatgctcaaggggtacaagtgtgtcgatatacgccgctcaatcttacctttttaaaagaattcaaggatgcttgtactcagtatggtcctacttctccatatgttaaaacggtattacagactctttgtaccgaggtcattttgcttcctatagactgcgaccttttggcaaaagctgttctaactccatctcagcatttacaattccatacctggtggtcagaggaggcccgcctgcaggctcagctaaatcgggctgatggcattccaattactcaggctcagctcacaggctccgataattactctgatactactgctcatttaggctttgatgctctcaccacggaacaagtaacaaaggtgtgtatgagagcttgggataaattacgcaccccaggccaagcttctgtttcttttactattgttaaacagggtcacaatgaattatatcttgattttttagctaaattacaagatgctgttgaaaaatctgtctctgatgagcacactcaaggtattcttcttcatatgttagcttttcaaaatgcgaaccatgagtgtaaaatggccgtgcattccatcctacgtcaaaatttacctgatcatgaggtgttgcctgcatatattaaagcttgtgaaggcgttggatcggagacccacagagctattctgtgggcaccggccatgaagcacggcaaccaaactggctcgactgattcttttcttggagcctgctataattgtggccaacttggtcatacccaaaaaaactacactgttaaaaacttaaaagcggccaagccggctcaacaaacacggccaaatgctcctgctactgtttgcctgcgttgtcgtaagggtaaacattgggcaagtacttgccactcagtctgatatagatgaaaatcccttgccacagaaccagggaaacaggaagcaaggccagtcccaggccccaatatcaaatgggacacctcggactcagaccaatgttgtgtttttgcgtcaagcagtcccaacgcagcccccagcacaaacaaatttacctacagccaatccagatgggtcccagcctcttcttctgtctcagtacaatgcttgtctacctccacagtaggcagcagggcggtcgatctctgtagtaccattcctctaaatttactacctaattctttgcctttaattgtccccatgggggtcactggccctttacctcaaggttcggtgggcctggtgttaggcagggcatccacctcatgatactaaaggtatcatagttcatactagtctcattaattctgattcctctgatgagattaaacttatgtaaacttatggtgtctgccaaagttcctgtttccattccggccagtgagtcaattgctcaattacttttactacctaacattgttttaaacaaaggagataagacatggggccctgggatgggctccagcggtgaaaaagccgcttattggattaatgtaatttctaaacaatggcctacctgcaccatacacattcaaggaaaaaaggttgagggcctagttgatactggggctgatgtttctattatttcctctaatttatggccttcctcctggcttaaacatcccactaacatgaaactagaaggtgttagaaaagctgaagaagttcaccagagcacatttatcttggcttgcactggccctgatggtcaaaagggaacaattcagccttatatcatgcccatccccattaatcttcggggcagagatttgctggcacaaattggggctgaaattaatattccacataacttttacagtgctcccagtcaacatataatggaaaacatggggtttgtttccagactcggtctcggtccaaaacgtgaaaaaattactaaacctcttcaagttactgtaaaagaagacaaggctggtttaaaagcataatttaactactccccactcccaattatatttagcattgtttaagctttctaaatgttcctaaaaacaatactctgactgcagctaaatgccattatacaggcaaaaaattctccctaaacgaaggcaagccagtgtcatggaaaaactcccaaaccaatacctgggaacctggaacaattataacgtggggaagagggtatgcttgtgttttaccaggagatcgtcaatcccgtctgggtgcccactaggagacttaaacttcgtgtgaatactgacaataaaaaccacgaggaagagacgttcgcgtcagagactgccctcatacctgatgagatctgtaccgactcctcagaaactggcatgccaaatcaaaatgggtctggttcaatcctccctaatggcaatgtaaacccctctaactaatcccacttctcctaattatctttttctccttacgaacctaaaaatctcaccatttctattagcctgaaaataacatccctctgttcttctcttcctccttcagcactggatctcacttacaataggttttatttaataattatcttccttacactttctgtctcaccagtttccccttaaactgatttacctgctacacaaaattattcttattgggcttatgtgccttttcctccacttattcgacctctcacctggatggatgctcctgcagaaatctatactaacgatagtgtgtggatgcctggaactacagatgaccgttgcmccgctcagccaggagaaggcactgcatttaatgttactatgggttataaataccctcctctgtgccttggacatgcacctggttgtatccatctagaagctcaagtctgggctgcttgtcttccagagagattagctatagggaaatggggacatttggtctctggcctctccctttctcctttaagacaaataaaaagaggagtaataggagataccccatactttcaatataaacctgtaggaaaaccatatcctaaaaattttgagggcccatctaaaacttcaatttgggaatgattgtgttaactcacatgcagtagtattaaaaaatgactcggctgggcgcagtggctcatgcctgtaatcccagcactttgggaggccaaggcaggtggatcatgaggtcaggagattgagaccatcctggctaatacagtgaaatcccgtctctactaaaaatacaaaaaaaattagccaggcgtggtggcagatgcctgtagtcccagctactcgggaggctgaggcaggagaatggcgtgaacccgggaggcggagcttgcagtgagctgagatcgcaccactgtactccagcttgggcgacagagcaagacactgtctcaaaaaaaaaaaaaaaaaaaaaaaccccaaaaaaacaactcatatggtttagtaacagactgggcacgaaagggctatttaaaaaacagttgctcctctggcggaaaggaatgcctggagactacttattttatttcttactgggaggaccaggatcatcatcctattttgcatagaaggttcagtttgttctttcccttaaaataggaagataagggcattatccccctaagtctcgtatgatattccccattctgagtccagaatacctagaaatttggaatttggctattgccgtgtctggactgtgagtatgggaaggggaagcttttctgtctgttgtccccactaccgcccctcacatccgtgattctgaaccccatgataaatgccctttgaacctttttcctccttttgatgccgaatccccttttatgggactccgccagcacgggtgcatttaaccttcctgagcttgcccacctgacgcatgcagccaagaagctttgaaagatggagtgccctggctgagggttccaggtctcagcaaggccacgaggtggtgactgcctcccagaactctgttgggccaccctccgtcctggagacccccaaaacctccatagcaccaactctgcccattcacacacacagtcagccctccctcccgagtccaccgcgggcagagggccagccaccatgcctcccatagccgccatccctgggaaggagccctgaccccgtccttacacccctctacactcactgcctgtggggagagctgctcgctgtcacaagcatccagggggctgggtcgaggggccccctgcatggtgggggaccatgttgtcgtgcatggaatgaaactggccacacataacagatatggtggcgctctggtcggatctaggggagtctgtcctacaggatgaggcttgaactgtcctgagtgaccagacacccagcctctgcttcgagtgctcagttatgattattgtcctgatttagttaactgttcttcaggggctccaggaggacgartgtgtatcctcccattgctctgtgcagcctctaacctctagagtctaggggtctggggagaagttgggaagtctggccagtggggccggtgcctggtgacctcgggaggtgggatatcatcatcttcagaactgtagttgttactgggataccagctctgggagaccacaggtgcagtcagcacagcaggaccttagacaaggcacccagccccagtttccccacctgggaagggggctacttgtggctagaagcagcccggactcctgagcaagactagaccaagaggccggtatgtggacacccccgcgtgggcacccccacggggacaccctggccaccgccgcgcggacaccctcacgaggacaccccggccgcgcggacacctaccgcggggacgccccgaccccatcctacctgctgcgccccgcgccgcgccccgcaccccgcccgccacggcctgcgtccgccaccggaagcgccctcctaatccccgcagcgccaccgccattgccgccatcgtcgtgsggcttctggggcagctagggctgcccgccgcgctgcctgcgccggaccggggcgggtccagtcccgggcgggccgtcgcgggagaggtgagagcgstggctagaccggggccgaatgcggccggattcggggcgggggccttcagacctagggtggaacactgggatagggtgtggggaattcgraccgctgtgaagtgatctgacgttgggtgggrgtctccggacttggggtggggaatctggatgggaactggggaattcggaccttgggtggggatctttggaccggggtggggtccccagactccttgtggaaagctgaggttgaagatctgtgctgtgatgaggggctccagatagcggtgagagatcccgcttcaagactgggttgggggtccagaccaggaggataagcctctccctggagtagggcttgacctggtgagggtgtggtagagtcacaggggagggtcccacttggtccttgggctgggatcagactctcagagctggagagttgcaggaggcctgggggagggtctgtggagccccagactcagagggccttggtgacttctccaacargctccctgttggaggmcttggggtaccccagggcctttccctgcaagagagaggctgctccaccaggaaggggcccaggastccccagggtcggggggatgtgtggtgtgcaggaccacgtgggaatgttagagaaaggggaagtcactccgggcctgccctgctaacagacctgctttttggatttytccagccagggrtttttgtgtcctgttgctttttattgtttaaagtgacyctccaagcctgagggaccgtaggagctgccctgcagagcccagtgagacactagttaatgcagaaaaaacagattttacttggtaactactgacaacatgagaaaaagctggctccatgctgatttgtctagatgtgcctggagtttaaagggagagtgagggagtgggaaggggtggggactcagtagagttagggaaacagaaaatcaccaaaactgggaagggagggttggcccctgtgaaaccaactgatctgggtttgccactggggcttaccgaagtcaggcccccaacctcccacagagactgggagacaggggccccatcctcaggtgttggctggaacacacaggaaattcttgtggcagccttgaacttctcaggcaggcactttagagggggctaggatcgttctgggaatgtggccttgagctgttaggagctatgttagtgttcgttccagcctagataggccagggtgaggcccagtggagaaggggactctaaggagcctggctggagtgtggggagggagggtctttgtcagcactccccctgtgcaagaagagcagagacctgcttctttcctctcaacagtccccgtccattttctgttctgtgttgtgttcataaactaccagcgggaccatctgttgagacttggtagcaaaggatttttgctggatgatgcaagcagtcaagcwtttaatgaggaaacaaaaataacaggccaggcacagtggctcatgtctgtaatcccagcacttttggaggccgaggaggatcacttgaggccaggagtttgaaacaagcctgggcaacataaagaccccatctctacaaaaaatttaaaaattagcccggcgtggtggcatgggcctatagttccagctrcttgggaggctgaggtgaaaagatcgtttgagcctgggaggyggaggctgccatgagccatgatcttgcctctatactccagcctgagcaacagagagcccctatctttaaaaaaaaawaataataataaaataaaaaaataaaaagaaagaaagaaataaaaacaaagatgaatggagctgttgataaacccagtttttgagcctacagggcagcagttgaggtttctggccgttgggccctaacaaggccagcaggggcactcagggacttcctggtgtgtggtgtgaagtctgtgatgatggcataggcattggtatcccagttgtggttactttctggagagagcatgyggcatgcaggagctggaggggggtcttcctgggcggcctgtgtagcagcagctccaggcacaaaggctgcccctggagaatctgttgtggttctgagttctttcaagtttatatcaagttttccggcttcagtctgcagggctgtttttttcagatcctgggggcaaagggcagctacaagaccacctgagtcccaatagggatttgagttcttggtgacaccaagtcagggaggagacaaattagaaatgtcagtctgragagagtggtaggtagccagatactgaaggaaagtagatgggaggatttggtaagggctgacgtgtaggaaggcagtgacagtccaagtgacaggcagatcataaaacctcaaggataggccgggcccggtggctcatgcctgtaatcccaagcacttcgggaggccgaggtgggcaaatcacccgagtccagaagttcgagaccagcctggctaacatggcaaaaccctgtctctactaaaaatacaaaacattagccgggcgtggtggtgcactcaggaggctgaggcgggataatcgcttgaactgggaggtggggggctgcagtaagccgagatcgcaccactgcactccagcctgggcaacaagagcgaaactccatctcaaaaaagaattaggccgggagcggtggctcacgcctgtaatcccagcactttgggaggccgaggcgggtggatcacgaggtcaggagatcgagaccatcctggctaacacggtgaaaccccatctctactaaaaatacaaaattagccaggcgtggtggcgggcacctgtagtcccagctacttgggaggctgaggcaggagaatggtgtgaayccgggaggtggagcttgcaatgagccgagatcacaccactgcactccagcctgggcgacacagcaagactgcgtctcaaaaacaaaacaaaacaaaacaaaacacctacaaaagacagtgaactagactaggatctgataactcccaagggggtgttatatttctccactgaagcatagcatttctctttacaaacccttcccttttgattgaagataatcaaagtgagattattcttatttaccaaataattctggtctcattaaatttggcctgattatttacataaatgcagcacgaacagtaattgaccacacaggcctttttaagtttgctgaaacttttaatagggaatcttagattgagctttttaaagccttt[450 bp omitted]aaagataattgcttcaattttgtttagagaagtatcatttactataatattacgagtcattgataggttaagagaaaagggaaaggtttctttctttttttcttttttgaggcagagtctcactctgttccccaggctggagtgcagtggcgtgatctcagctcactgcaagctccgcctcctgggtttacaccattctcctgcctcagcctcccgagtagctgggactacaggtgcctgccaccacgcccggctaattttttgtgtttttagtagagatggggtttcactgtgttagcaaggatggtctcgctctccagacctcgtgatccacccgcctcggcctcccaaagtactgggattacaggcgtgagccaccgtgcccagccggggaaaggtttctttttttaatattcagaaaataaaacataaagagccaacaatattctgaacaaaagtcataaaaagactgtaatcatccttcagcagtttactcagttgcatgcaggtactgaattcttgttctgcttgatcttgggctagcaggtacatgaacccatcttttctcaaccagtggagatcctggctyagtgcagtcatgtgatctcaaagttaagaaatgctgtcacgcccaggtgcagtggctcaggcctgtaatcccaacactttgggaggccaasgtggctatatcacttgaagtcaggagttcgagaccagcttggccaacatggtgaaaccctgtctctaccaaaaaatacaaaaattagccagttgtggtagcagacgcctgtaatcccaactactcgggaggctgaagtgggagaatcgcttgaacccgggacatggaggttgcagtgagccaagatcacgccactgcactccagcctgggcaacacagtgagactccatctcaaaaaaagaaataargaaatgctgtcagaagcctaccccayggtacctgtcatgggccttttcattggtccctttttgttgaagatgaagcactttgccctgtagctgattgcaagagatttcaggaaagcatcagagtaaaactctaatgacaaaagacttaaaatagtgtagttaaatatctaatgagagatcattacaaaatcaaacgatttacaaggaatgttggttgtttatgacacatagcattttaaataataaccagaatgatgattgctgttatatgaggacatgtcattggcagaagggtattcaccagtttgtgggaactttatacaatatctggaatccttatattaacatttaccaatatgcatgtaactcaaggaagtttaaatagcattaaaaaaaatttttttttagkttttttttttttttttttttttgagacagagtcccrctgtgttgctcaggctggagtgcagtggcacgatctcggctcactgcaacctccgcctcctgggctcaagcgattctcctgcctcagccccccaagtagctgggattacaggtgtgcaccatcacacccagctaatttttgtatttttagtagagatggggtttcrccacactggccaggctggtcttgaactcctgaccccaggtgacctgcccaccttggccttccaaagtgttgggattacaggcgtgagtcaccgcgtccggccctaaataacattttttatttgacagcaccttgcatgaaattctgtagggtccagccctacagggtctgtgggtttttctccccgtgtgcagagatgagagatcgtagaaatraagacacaagacaaagagatagaagaaaagacagctgggcccggggaccactaccaccaagatgcggagaccagtagtggccccgaatgccaggctgcgctgttatttattggatacaagacaagggggcagggtaaggagtgtgagcyatctccagtgacaggtaaggtcacatgggtcacgtgtccactggacgggggcccttccctgtttggcagccgaggcggacagcgagaggagacagcttatgtcattatttctgtatttcagagacctttagtactttcactaattttgttactgctagttagaaggcatagccaggtacagggtggaacatgaaagcggaccaggagcgtgactgcttaagcacagcatcacagggagacggttaggcctccggataactgtgggcaracctgacactccacaagaggtggttgagcagagtcttctctaactcccacagggaaagggagacttcctttcccggtctgctaagtaacgggtgctttttctaggcactgacgcaactgctagaccaaggtccgctaagtaacaggcgtcttcccaggcgctgacgttaccactagaccaaggagccctctagtggccctgtccgggcataacagaaggctcacacgcttgtcttctggtcacttctcaccgtgtcccttcagctcttatcactgtatggcctggtttctcctaggttataattgtagagcgaagattattataatattggaataaagaktaattgctacaaactaatgattaacaatattcatayataatcatatctatgatctatatctaatgtaactattcttattttatatattttctttattatactggaacagctcgtgccctcggtctcttgcctcggcacctgggcgacttgctgcccacaaaattcaccattgaaataaacctaattagtttaacatctctcttataaggtcacaggacagatcctttgaggtcttccaggggccctccaggaaatctcaagtcagtctgagatcaagacaatgtcacaggccacatgcagtggttcacgcctataatcccaacactttgggagtccgaggagggaggaytccttgagcccaggagtttgagaccagcctgagaaacatgctgaggccctgtctctacaaaacaaaaarttgaaaaattagctgggcatggtggtacatgtctgtagtcccatgtactctgaagactgaggcgggaggatcacttgagcccaggagttcaaggttgcagtgagctgtaattgcaccactgcactccagcctcagtaacagagtgagactctgtcactaaaaaaaatttaggctgggtgcagcggctcacgcctataatcccagcattttgggaggtcaaggtggacagatcacctgagatcaggagttcaagaccaggctggccaacatggcaaaaccccayctgtactaaaaatacaaaaattagctgggcgyggtgccatgtgcctgtggtcccagctacttgggaggctgagacagcagaattgcttaagcctgggaggcagaggttacagtgagcccagatcacaccatggcactccagcctgggtaacagagcgagactctgtctcaaaaaaaaaaaaaaaaaaaaaaaaatttaaagaaactttatacataaatccattcaatgattatgaggtcaattctagccagctttgacctcataacataaaatttcttttctgcagactttcttgaggccaggagttcaagaccagcctgggaaacatagggataactttctgtatccattcacagttgcttttgttttgagacagaatctcagtctgtcacccaggatggagtgcagtggtgagatctcagcttactgcagccttgacctcctgggctcaagcgatcctcctgcctcaccctcccaagtagctgggactacaggcatgtaccaccatgccaggctaataatttttgagtttttttatagaaacagggtttcatcatgtttcccaggcttgtctcgaattcctgggccattcaggctttgtcccatatttttcctctttttgtaattttacttcaggacaaaattacatccctttctttaacaaaaacactctacattctttgcatacttttcatataaaaacacatcctatcttcctcccatactttgtataggaaattgtttccctcattcttattgtttctaggagttttgttttcatatattgattataatttttaaccattagtaaccggtattttttttttaaagagacagcgtcttgctcttttgcccaggctggagtgcagtggcacaatcaggactcactgcacccttgaactcccgggctcaagtaattctccaacctcagccccctaaagcactgagattacaggcatgagtcaccacgcccggccataacttgtattttacaagtaaaactgggaagaagacaattggaaattgtctgtcatttaccagtttgttggcaaattttatgaatataccatcttataatctctagaggtatatcctttttatagtacaatgtttttaagtgccaagtacatgtttattaacagaccagaatacctttagccagtctgtaccatataaaaataagaagccaaaaagtacaaaaagttacgcttaataatgaatgttkcagcactttcttctcttcaggtattatttagatattcaatgaatgtctattatttaacttcacttagtatgactctgaggttgaaagttactgaaaacatcttgkaagcttttttaggccaatatattatcaaacgcaattaacaaaacacaactcactagtttatatargagctagttctcacttttttttttactctattttatatattttttcttttcttttcttttcttttyttttttttttyttttkctgtagagacaaggtcttgctgtgttgcccaggctggtcttgaactcctagcctcaagtgatccacttaccttggcctcccaaagtgctgggattacaggtgtgagccaccacccagccctattttatatttttatctgaactgtgtttctggcaaattggacaagttaagggtcacttgctccatgtgaggggaaggctttctacctgtatttgtggataagacctttacgacttgttttgccctgatggatgactacatgtttccagtgagctcagctggttgcttttgtgggtccctgaggcactgcgagcccctgatggggcaggaagcctaaagttccagggaccgtggggagttgaggggctggagggggaagagagaggcctgcagcggggatccacaggtggaggaggccagacttgaagggggtgtctccttcaagagaaagtagggaagtatggaggtgataggaagggagaggcctgagaggagctagtttggggagatctcaagtatcccaaaggagccactgatgttccaaattatccttggtaaagtcacatcaacaaggaaggaagcagacagaggcgcacttgttccttgcagttttgttttgatgtgctgattaaagtagcgcagagggcatgatcagcagggctccagtaagacgctcccacgggaggagcaagaacacagaacagagggggcaagacagctccaccaggagtcaggagtgaatcccctctgggaacgaggcactaggaagaagaacttccagcccaggaggtaggtagcgttcagaagaagcctggggcgggcgcggtggcgcacgcctgtaatcccagcactttgggaggccgaggcgggcgaatcacgaggtcaggagatcaagaccatcctggctaacacggtgaaaccccwtctctactaaaaatacaaaaaattagccgggcgttgtggtgggcacctatagtcccagctacttgggaggctgaggcaggagaatggcatgaacccgggggacggagcttgcaatgagccgagattrtgccactgcactccagcctgggcgacagagcaagactctgtcycaaaaaaaaaaaaaaaaaaaagcctgggactcttagcgcctcagagccttactcagaatcataaaatcattagaagcaatgtctgtcctcactgctgcatccgatattcttccggaccactggatcacaaatcaaaccatgtgactcccgcatgagcaggcagagtggagataacacggatcgctgtgtacactgtgtgctccggttgttgcatccragggttgatcggatggtggttcccatccagatccaagtcctggcccctgatcacagagaaacacagctggacattaaagtggtgaggacggaaattataatatttggtgaccagtgacaggaggggagagagccgagctccgctccgagttgtgcaaagaagtggggagtggggaggaagaacagtggggactcagtggagtgaggaaagtggaaaattaccaaaagcaggaagggagggttagccttgggaaaccratctgggtttgccacgggggcttactgaagtcaggcccccagtcccacagaggctgggagacaggggccccatcttcargtgttggccagaacacaggaaattctcttggtagccatgactttctcaggcaggcgctttgaagggggctgggatcattttaggaatgtggccttgagctgttagaagccatgtgcagtatggcttacacctgtaatcccagcactttgggaggctgaggctggagaatcacttgaggccaggagtttaagaccagcctgggcaacrtagcaagacgctgtctctacaaaaataatttttaaaaaattagccaggcactgcggcatgcccctgtgtagtcccagttactcaggaggctgaagcaggaggactgctggagcccaagagttcaaggttgcagcaagctgattgcaccactgcactccagcctgggcggcagaggtgatcacgccactgcactcccgcctgggcgacagagcaagaccctgtctttaaaaacaaaaaggccaggcaggtgcggtggctcatgcctgtaatcccagcactttgggaggccaaggcgggcggatcatgaggtcaggagatcgagaccatcctggctaacatggtgaaaccccgtctctaccaaaaacacaaaaaagttagccgggcgtgstggcgggcgcctgtagtcccagctactgggaggctgaggcaggagaatgccatgaacccgggggatggagcttgcagtgagccgagattgcgccactgcactctagcctgggagacagagcaagactccgtctcaaaacaaaacaaaacaacaacaaaaaaaaaacagccgagcgcagtggctcacgcctgtaatcccagcactttgggaggccgaggtgggcagatcacaaggtcaggagttcaagaccagcctgaccaacatggtgaaaccttgtctctactaaaaatacaaaaattagctaggcgtggtggtgtgagcctataatcccagctactcaggaggctgaggcaggagaatcgcttgaacccaggaggcggaggttgcagtgagccgagatcgcgccactgcactccagtctgtgtgacagagtgacagcccgtctcaaaaaataaataaataaataaataaataaataaataaataaataaaatgaagcagcagcagctttgttagtgtttgttcaaggcctgataggccaagrtgaggctcagccgagaaacgtgctcagaggagcctggccggagtgtgatgggggagtctytgtccaggctgctgccayggtgggcctcaggactcatggcctgggcgctgggggtggggctgccactcagccttgaggagagcaatgaggaggtcagattccactcacatccagtgcggtctggatgcaggcctggcccagagcctggtccagatgctggggctttgtttttttgttgttgtttttttgagacagagtctcgctctgttgcccaggctggagtgcagtggcactatctccactcactgcaacaacctccacctccacggttcaagcgattctcctgcctcagcctcccgagtagctgggactacaggcacccgccaccatgcccggctcattttttgcatttttagtggaracagagtttcaccatgttggccaggatggtctccaactccagaccttgtgatctgcctgcctcagcctcccaaagtgctgggattacaggcgtgagccactgcacccagccggctttgtttacagtactcagcagctgccaaaatagtccccattcccaggcagggcaggctcccgggctcagtccagcggggcagatggccagcctgcacgtcaccccactaggcatgtccaggccctttctgcccctccctaaaggcacccctgtcctttctgtcccctccacactgagccaagccagcctccactcttgccccaggcctgccctctgctgggagccgggacactgagctcctgccacatgagcaggttgacctgcagggggcctccaagcaggtgccaaggcagaatcggatgtgaccaggagaacacccttgaaggataaagcgaatgtgcgaccaccatgcaggtctggcccatggaagggagggragggggccccgrcggrgccacagtaaaggagtggaggggccccacaggcagggatggcccagctggccccctggggctgtgaatctgcaggtgcagtgcagcctcttgcctctctcagcccagcccttgcatctgcctcttggtgtgtctgtgaagacaaagtcaccgtggtccctgcagcacctggcttgaagcaggtgtgcagtccgtgtgaaagccttccctttagctattaggtattgagtcaaaaaaaaaaaaaaaaaaaaagccttcccctgagcctgggtgcctggccccactgaggataccaggcgggggaggctacaggaggctgccctctgcctggccatctgaccttccattctgaccccttcccttccacaccagcccctttccctatgtagggtgcagtctttgttgcaactgctcacctctgccatggtcggatgagagcagccacggacaatgtctgtgcaattgtgcgttttttgttttgttttgttttgagatggagtcccactcttgttgcccaggctggagtgtaatggcaccatctcggctcactgcaacctccacctcccgagttctagcgattctcctgcctcagcctcccaagtagctgggattacaggcatgcatcaccatgtctggctaattgtgtatttttaatagagactggggtttcaccrtgttggtcaggctgttcttgaactcctgacctcaggtgatccacccgcctcagcctcccaaaatgctgggattacagacgtgagccaccgtgcctggttgattgtgcgttctgataaagcttcatttacagaaatagcaggtaggcccctcgcagggtgcccagagcaggtgcactgtctcacctcttctcaggtgtcaccggggtgagaggctagtcctctgcctcctccttcctctctgcaggttggagaaatgacagcttcttgtactgggggttatgagacagtggcaggagggggacactcccagagtgctgccagaaagaggcgaggccccatctggatttgatggcatttttattgtggtgttgttttagagacagtgtctgtcgcccaggatggacgacatggtgcaatcatggctcactccagcctccaactcctgggcccaagcaatcctcccacttcagcctcctgagtagctgcagctataggcacaccaccatgcctggctcaatgggtattttgtggccattaaacttctggtcattcctttagattcccagaggctggatggaggtgagtggccagcccctgggtccagagatgagcgcggggcctggctgcagcctgtggggtctcccaggctggcctccaggtgtcctctcagcctgtccacaggcgctgcccaagcgtgtggcctacctggtgctgcctggcctgtctctacgcacctgtactggctctccctggattactggatcgcagtcgaatcccctgccagaatcctggtccccctttatcacaccggatcagccccaaagggcagggcttcttgcagcagttccagcctttgctgggggtttccagccctgttgagcaagccccaggtagggccctctgcagcccccgtgggggacctgtgtgccgagcagagctgccccgtgtgtaaacgcttagaactggcctccttcctgccatctgtgtcctgtttgtcatcacgcctgtggctctatgcttgtctccccgactgggccaccagccctgtgagggcaggatgaggcacgtccaagccacagtggctctcagtgtgcagggtgctgttagcattggttctgtgttctggaatagtgagaacagtgtgccccaaatggccagtggcctttccgagggtcactgcagccgcatgttggccctctgtggagaacggaggatgcacagccatttcagagcacaacctgaggtctcctgagcttgctgtgcagcccagtctttctctccgtggcccctggtagctgtctttctcccaggaggaggagaaagacaccttcctgagcaggaggatgtgggtgaatagagaccaaagtgtcaatcactcttctgacagaggtgatagcagaatgaaaaactgatggaccccagatctttgcaaagagaacaaagtcagtttctagttatctttctttcttttttttctttttttctttttttttttttttttttttttttgagatggagtctcgctctgctgcccaggctggagtgcagtggtgtgatctcagctcactgcaaccgcctcccgggttcaagtgattctcctgcctcagcctcctgagtaaccaggactacaggcacacaccaccacgcccagctaatttttgttatttttagcagagacagggtttcaccatgttggccaggatggtcttgagctctctttttttttttttttttttttttgagacggagtctcgctctgtcacccaggctggagtgcaatggagtgatcttagctccctgcaacctctgcctcccaggttcaggctattctcctgcctcagcctcctgagtagctgggactaacaggtgcttgccaccaagcctggctaatttttgtatttttagtagagacagggtttcaccatattggccaggctgatctcgaaatcctgaccttgtggtctgcccgccttggcctcccaaagtgctgggattacaggcgtaagccaccacaccaggcccattttctagttatcttttacggattttttaaaatgagcctagaaaccaggtcatataattagtttattttttaatttcttatagagacagggtcttactatgttgcccagagtggtcctgaacgcctgggctcaagtgatcctcctgcctcagcctcccaaagtattgggattacaggtgtggccactgttccagccatagttcatattttaaaggatttttaagagtctcatttcactgatgttacttgcagtatatttatggaaaacattcctgtcttttttttttttttgagacggagtctcactctgttacccaggctggagtgcagtggcgtgatctcggctcactgcaagctccrcctctggggttcacgccattctcctgcctcagcctcccgagtagctgggactacaggtgcctgccaccacacccggccaattttttgtatttttagtagagacagggtttcactgtgttagccaggatggtctcgatctcctgacctcgtgatctgcccgccccggcctcccaaagtgctgggattacaggcatgagccaccgcgcccggccagcattcctgtcttttaaagaaagatgagaccagatgcagtggtgtgcacctgtggtcccagctactcaggaggatgccttgagcctgggagttcaaggctgcagctgcagtgagccttgatcacgccactgcactccagcctgggcaattgaacaggaccctgtctctaaagaaataaaataaaggcagatgaatgtcatctagggtgtgtccaatgtgagagagaatactgaccaggtgacagaggtgatggactctctagctctgcagcagactgctgggcagagaagcttgggcaggcctggcactgaggcccagaagcttcatgctctttagagccagaggtgtcaagcccagctgcctgtgtcctggccgcactgtgaggcactgaggatgccctcacrcgtgcatctgcatgtggcgtgcatgtggcaagcatgtgcaggtgctgtgtgggcacgatcatgcctgccctctactgtgctggagaggtaagaccatcagccgtttcacagaggagggaatgtggacctcacgggggtctcatgagcttgcgagccgatggccaggcagccggtgcagaaggttcatccattttgatgaaccgtgaattcatctgtactttattcattttaataactgaatcatacctcattgtatggctctaccatgttttattatccattcaggtgctaacggatggaagggttgtttctacctgttggccattgtggatgatgttgctatgcatattggggtacgagtatctggtttagtccctgttttcaattcttggtatacacctaggagtagaattgctgggtcatatggtagttctattttaacttttttttatttttaatttttgtgggtttttaagaattttttaatatttgtgggtgcatagcatgtttaattttttttttttttttgagacggggtcttgctctgttgcccaggctggagtgcagtggcaggatcacagccctgtgcagcctcaacctcctgggctcaggtgatcctcccgcctcagcctcccaagtatctgggactacacgtgcggaccaccacgcctggctaatttttaagttttttgtagagatggggtcttgccatgtttcccagactggtatgggactcctgggctcaagcaatcctcccatcccaacctcccaaagtgctggaattacagtcatgagccaccaggtctgaccacatgtttaactttttgaagaactaccaaactgttttccacggcattcacaccagcaatgcaagagggttcccatttcatcacatccttgctaacacttgttattttccttaaaaaaaaaaaaaaaaaaagccagctgggcacggtggctcatgcatgtaatcccagcactttggaaggccaagggggtggagcacttgagctcaggagactagcctgggcaaaatatcgagaccccacctccactccatctctaccaaaaaaaaaaaaaaaaaaaagctgggtgtgcggtggtgcacatctgtcgtcccagctacttgggggggctgaggcaggaggatcccttgagcccaggaggtcgagactgcagtgagctgcgaccgcgccactgcactccaggctgagcgacagagtgagaccctgtttcaaaaaaacaaaaaaaaagcacatttcaaacatacacaaaagcagagagaattcccctcggtcctccggcctgcaccccaccgccccccaccacaggggcattcaaaactgtctttttgcctctctgtaaggtaaggggggactcttgacgctccccagaccacacagccaaagtagggcgatcggatcatagggggtcccgagtcggacactgagctggcgtgcccactctcgagtcctgggaccccaaactaaaggagctgttccttttccccatggagggctgacggggcaaaatcccagggctgggaacatccgagcagctttgagtagcacaggtgggtttctacgtggctttctttaaagggaggcctgattctcggcttttcaggacccgccctccattttctcacttgcctgctctttcgtcctgcgaaactgggcagtggccggtgacagcgcagggtcagccctcggatggccaggtgggcgtgatcccaccctcctccgtggctgggtgggcgtggtcccaaagtcaattggatgtggtcccgcgtccctcccggcccagtgggcggggcctccccttctggggcctcccatcccacaccagcgagcagagaggagggtgggcggggaggccctacggggctggggcggggcggagcggaggtggttagctgtcgggaggtggggtgggcaggggccagggctctgttggtggcccggggcagccagtccctctgctcagggcttcagttcacactcacaagggaatcccagcgctcttctcctctggcggttgctggagggccttgtgaggtggccgtgggcactgtagcccccaggcactgcattgtggcctgggcgtgttggcctttgagcctttggccttgagcacttccccakcccccatggctcttggccattggaccccagttggccacagagccgcgggcaggtgggacaggcgggcactgggtgcctcyttgcaccagccaggcccagcctgcagagtggagtgggccggtccctcctgccaggcaaaggaagggggcttcgggcccctccctgctgtggcctcctcccctctgctgcctcccactaggccctgggagacactgcctgcagatttatgaacagacagacctagagattagagattcaaaagccaaattcttacacaattcaagtattaacgcagatttggatttataatttgggactccaaggtctaccaagtaatttgctgtttcagaatagcccttttaatttggggtatatatttctaacactgttttttaaatatggagagtaaacaaaatggcccattatctgaccacacaaatactagtagtcattatagataaaccatagcagataaataatagtaaacaaagcaacaggctgtgtcataggaaatccccaccatgaagaaaggagcaaggtggaaagttctggctgcttcaggtctgcatggtccctctccaccatggttccccctgtcatcttcctgccagaataaggacactgtccttagggaagcaccatctcttgttttttccccacgagccctgtgggtcatggcacgtcctgccccgctgggaaacacagtgggccacgggtttccctgcaggcctgggacccttcccaagggtagcagcagaaggcagcacgattcccactcctgcagctgtggacaggggcacccccactgtcactgagccctgcaccgggttccatcacctgctcggggctctggcctttggccttttcctgtgagctgcatgttggccactgtgacctatctgtctcatcatctttttcttactggtttgtgtatgttcttggtaaacyagcccttggtcttacacatcatttccaaggtactaaggactcttcaggggaaatacaacttgagcagagtggttccctcctcttgtggttcacaaggtgcaggtgcacacacacatagcccacagggcagtgtggacagggaccaggagactgcccctggggtccctggctgggggacactagtagggatgtcccttggcctctctgaggccttctgctgtctcttctgaggccggaaaggcgaagcactgccctcgccctgctagggaaggctcaggccaggctggccctatccggggaaggggctcaggtatctggaccttggtcatcgccaggttagggtttatgttgatgattatccaaaggcaaaattgatttccacagaaataacatctgctttgctgccgagctcagaggagaccccagacccctcccgcagccagagggctggagcctgctcagaggtgctttgaaggtgagttggccaacggaagccggggcagtgccagggtgggtacagattccsgcccggtgcatgggcacaggtctgctgagcacatgtccactctgcctgtgtaaataggccacatggcctgaaatcccctagaagcctggtgtccgcatgacctccccctagggcggagcctctgcttccctgttctcttctgctctgtcytctggtgccctgaggctggcctccaggggtgtcccctctgtggccctaggcctgcctccttgcctgggtgtgcctttctaaaatggagcgtccagcagagagtgggatctcctatgccactgggagcccagggccccatcccagaaagacctctgagtgagcacaggggccctagaagaagtttccttgtgtccttcccgttttagggtctgtgacctgaacccctgggcttctgcctcaggcctcctgtgctctgctctctgcctgctgggtcccctcaccaggcttctgtctggttcccaggctacctgcctggagggtcacaccaggaggatttcaaacaggtttcaagtggggtcacttgccatcactgtgccccacgaggtacactgttgtgggcggcagggctggcctttctcatctgggacatgccacgttgctgttcccaaggggagtggtgagtgggtctgtcctggtgtgcctggcctggggactgccagtgtccttacttggacactcaatgaaaaggccacatgaatccctggggcgtccagagcatgggtgaccagcacgggctcaccacatgaggccaaggggctgcaccatacagcctctcctttggccacccgtsactacccccaactccgggccatggggcttccctacccctgggtgtcctctaagccagctgggagacaacagcctgagtccgtgtctgcttctgtattttgtgyggttttagaggatccctgggctgcctggggaagcacccagggccagggagtgtgaccctgcaggctccacacaggactgccagaggcacacacctgctctgtctacccgagggcaccagagggcacgagaaggctggytccctggcgctgacacgtcaggcaactgaggcacaaggctggcatttctgaaccttgcccctctgcraacacaagggggcgatggtggcactccaagcaaaggggcgtgtgggtgctgcaggaggagcacagagcactggcgcccctcccctcccgccctgcagatgccggaggccccgcctctgctgttggcagctgtgttgctgggcctggtgctgctggtggtgctgctgctgcttctgaggcactggggctggggcctgtsccttatcggctggaacgagttcatcctgcagcccatccacaacctgctcatgggtgacaccaaggagcagcgcatcctgaaccaygtgctgcagcatgcggagcccgggaackcacaragcgtgctggaggccattgacacctactgcgagcagaaggagtgggccatgaacgtgggcgacaagaaaggtggggtcygggccagcaggtgctcagctctgggacagggacccaggaccaggcatcaaagcccttacaggagaagctgttatcaccccrtttccagggggctgggaaccctgggatatgcccagatagggctggggggctcctctggagtcccagggtgccagggtccctgatgacccctgcaggccctgctgcctgctgccccaggacaacaggcccccacactcacagggtctgacggtggtgcagttccccttgaactctgttctggccaccatgggacctgcctggggaccagtcagacaggttctcctgggcccgcctcccgcttgaacttcagcctggggcacaggatgtgttaccgggctcacggagtgactcagggaactagtgccgccccagggccccaaggtgggcggttcggkgattcagagagggcagctctgtgttaggacacactggggccagccaggaagggtggaaaagatagggaccagcgtgagcatagaggctaagggaccatgggagctccaagcgcgctcacagtggggaccaggtcctgggggctggggacaccagggaggtgaaatacccctccagcgggtagggagggtgggcagaggagggccagcggccaggcatttgggaggggctcctgctctttgggagaggtggggggccgtgcctggggatccaagttcccctctctccacctgtgctcacctctcctccgtccccaaccctgcacaggcaagatcktggacgccgtgattcaggagcaccagccctccgtgctgctggagctgggggcctactgtggctactcagctgtgcgcatggcccgcctgctgtcaccaggggcraggctsatcaccatcgagatcaaccccgactgtgycgccatcacccagcggatggtggatttcgctggcrtgaaggacaaggtgtgcatgcctgacccgttgtcagacctggaaaaagggccggctgtgggcagggagggcatgcgcactttgtcctccccaccaggtgttcacaccacgttcactgaaaacccactatcaccaggcccctcagtgcttcccagcctggggctgaggaaagacccccccagcagctcagtgagggtctcacagctctgggtaaactgccaaggtggcaccaggaggggcagggacagagtggggccttgtcatcccagaaccctaaagaaaactgatgaatgcttgtatgggtgtgtaaagatggcctcctgtctgtgtgggcgtgggcactgacaggcgctgttgtataggtgtgtagggatggcctcctgtctgtgaggacgtgggcactgacaggcgctgttccaggtcacccttgtggttggagcgtcccaggacatcatcccccagctgaagaagaagtatgatgtggacacactggacatggtcttcctcgaccactggaaggaccggtacctgccrgacacgcttctyttggaggtgagccccaaccaggatggcatccgtgccagctgctgcccagagcccattcagtcagcctcagcctctccaaasagccaggcattccagtagagccctgtgtggacacagctcgctctggaggcaccacctgaggtctgggagtgtgggggactgaggaggccctgtggtgggtggagatgggtggggagctgggccaggggcctggctgggtggcctgttgggaactggggagccagctgcctgtgcaggtrcaaaatgggtggcagaagtggggtgcacaccccagaccagacaccagggcagaaacggcacaggaccaaggagatggggtggggaagggccgctctgggcccagcctgctctcccccaagcaagccactgctcgtgcaaagaaagcatgtgtctcctgcagatcttcctcctgaggccccatcttgtgcattcccccaacccagccccactggcgaggaccctgagtgccccgagtgaggctagacagcgggtggggctgtcctcgcttccctggggggcgtggggcactggtggcccttcacagactgatgcttaaggagcctcacatcagtgacacactgccccatccctccctggtggtcagcgacactgagtggctctgtgatcctccactgggcttgggacacccaccctcacggcctcyccacctggtgctcgctcacctgcagctctcccagaaactggacactgctgttagcagccrgactaggagcacgaggggcacagsccccatgcctggctaggtagggccgctggaccctggacacggattggaaggaaccagcactagcagaagcctgaggtgtgaaagggcagagaatgttccaggaacaatgggagtcagggcacacaggactttgggcaggtgaggatgaggttagacctgtcttctggagctgggctcaggggctcatgcctgtaacccttgcactttgggaggctacggcaggaggagcgcttgaggccaggagagttcgagaccagcctgggcaacatggcaaaagaaaaaatatatatatatattttagatggagtcttgctctgtcaccaggctggagtgcagtggcacgatcacggctcactgcaacctccacctcttgggttcaagcgattaccctgccttagcctcctgagtagctgggactacaggcgcgcgctgccacacccggctagttttttgtagtttagtagagatggggtytcaccacattggccaggatggtctcaatatcctgacttcgtgatccgcccgcctcggcctcccaaagtgctgggattacaggcgtgagccactgcgtccggccgtattccagctttyaaaacaacaaamaacaacaaaaacttttctggaaagatccctgtcagccttgtggagtgtggagagggctgtggggagggcatttcagatgccctgaactcacgaggaggcactgaaccctggccgtggagagggaggacctgtagtggccaagggggtgggcattgggagggtgggagggagacctacaggccaagacagggtagctggaggggggctcacccctgacaaaggagcatgatgctggcaattgggtattgatggcagagagctggcactcagccagatgggcttcacttgggcaggaaagacacccacagctgggcctgcgttactgcggccgagtttcagcagctgtgatgtgggtgctaattacaggggcctgccttcatagaaaagtagcaaacattgcagtttagtaactaggaaactaatagttttctcagtgctgcttgcgcaaagctggtaattatctcaaaagaagcaaagtcatgaagtgggaagtcatgaattgggaatgggtgtccttgttaaacgcacatctgcacactcagggctggggccctgtgcccccttgtggagggttaggggacaacctggctcttgtgagggtctagccatcccctcagtgggttctgtgagcatcggaggcacgrggggtgaggggctcaggagcaggttgcaattcaaaatcaagggctgcttygaggaggcctctccaccgggctgctgtagtcaccaagtccagcccatgcccaaaggaagaggaatgagttcccccttaaaaaaaaaaaaaaaaagaaaaagacagagtcttgctctgtgcccaggctggagtgcagtgatgacatcatagctcactgtagcctcaaactcctgagctccagtgatcctcccacctcagcctcctgagtagctaggactaaaggcatgcaccactacacctggctaatttaaaaattttttgtagaaatggggtctccctatgttgcccagactggtctcaaactcctggcctcaagcgatcctcttgcctcaacctcccaaagtgctgggagtacaggtgtgtgcttggtctgaggctccaactttttgttgttgtttctcgagacagtctctcgctctgtygcccaggctggagtgcagtggcgcgatcttggctccctgcaacctctgtgaggctccaactcttgaagggaggagagtctaaggagggtgggccagatgaaaaccacctcagcatagtgtcacctgctcctctgacactgtcgcttctccayggcattagattttcagtcctgctcagacgctgatgcatgtttagccagttctccaggtggtctgagtagctggtaggaggcttgcagtgtcgggcgacaggcaggacaggtgctgccttctttcccctcttgaccagtttcgtaaaggagtgggcccctggcagcctccaaaggtgacccatgctcctttctgcccttccctccttctttcctgtttaactcgtgcaggtgcagtggtctggtgtctttcagtccgctgacgtcttctgtatccctgatgaccagattgggctcctgagtcccctggcgcaacccgagaagtccaggagcccaggcccctcactcatgcattccctggcccagactggaaggcagccgccctgctcaaggcctaggccattgtcctcctcccgggtggcgctttgttctacgtcttttcagctgacattgctaggacatttttttttttttctaaatgaaaacacatcatgattcatggtggtacttcctgctcaactccggaccttggggctgtcccctgacctcactgaccttgcagccgtgtggtgtccatactgtcacatgaaagccccctgctttctctgcagcatacaggctggaaacgaccgccacccaccaccaggacagctgcaagccctgtgggactctccaggcccatcccagaggcatgtggggtcrgataccagtgtttcaaggcacctgcctgcaaattgattttattatactttagatgtttgagattgcttgttaacttttgtttggtgactaagtcaaatttccaagacaaggtgactggggtgtcccttgccctggtaggtccttcctccccataggcaaacacttcctctcaaggtttcttgtttatgtgatgtaagcaaacccttttctgatagcatagataggcaagcatcctatgaggtttctcccgatagtggaccccacgggccatgccctatggctgcgtgtccagtaacaactccttccttctgcacagaacccaggcagaggaactctgtgtcctcccagggcccaggcactggtgaagatggggggtctgcaaatgcaggagcttggggatgtccagaactgaccccaaggggcaggcttgttgatgggaggtctgccccacctcagccctgcagggtcaccctggtcaggccaatattgtctccagggaccataccagcaacccctctccttgggtgcctctccctcataggcctgagttcctggcactgggtgttgagggccccattgtttccactcacccagctagcatttattgagcacctactgtgtgccacatgctgttctaagggatggatactcctgagatggatacaggagttgatgagagaaaggtccctgtcctcacggggcccatgttctgaaggtggcacccaagtcttgtacagtcctttcctgcaggagtcacgctgggcagaaagtggaaacctggccccaggggctaggcacaggcgyggtgccgtggcctagtgaggagcacccatcctggtttggggcaggttctctgggcacctctgaccctcacctcccccaccccccggtctgtttgcaggaatgtggcctgctgcggaaggggacagtgctactggctgacaacgtgatctgcccaggtgcgccagacttcctagcacacgtgcgcgggagcagctgctttgagtgcacacactaccaatcgttcctggaatacagggaggtggtggacggcctggagaaggccatctacaagggcccaggcagcgaagcagggccctgactgccccccccggcccccctctcgggctctctcwcccagcctggtactgaaggtgccagacgtgctcctgctgaccttctgcggctccgggctgtgtcctaaatgcaaagcacacctcggccgaggcctgcgccctgacatgctaacctctctgaactgcaacactggattgttyttttttaagactcaatcatgacttctttactaacactggctagctatattatcttatatactaatatcatgttttaaaaatataaaatagaaattaagaatctaaatatttagatataactcgacttagtacatccttctcaactgccattcccctgctgcccttgacttgggcaccaaacattcaaagctccccttgacggacgctaacgctaagggcggggcccctagctggctgggttctgggtggcacgcctggcccactggcctcccagccacagtggtgcagaggtcagccctcctgcagctaggccaggggcacctgttagccccatggggacgactgccrgcctgggaaacgaagaggagtcagccagcattcacacctttctgaccaagcaggcgctggggacaggtggaccccgcagcagcaccagcccctctgggccccatgtggcacagagtggaagcatctccttccctactccccactgggccttgcttacagaagaggcaatggctcagaccagctcccgcatccctgtagttgcctccctggcccatgagtgaggatgcagtgctggtttctgyccacctacacctagagctgtccccatctcctccaaggggtcagactgctagccacctcagaggctccaagggcccagttcccaggcccaggacaggaatcaaccctgtgctagctgagttcacctgcaccgagaccagcccctagccaagattctactcctgggctcaaggcctggctagcccccagccagcccactcctatggatagacagaccagtgagcccaagtggacaagtttggggccacccagggaccagaaacagagcctctgcaggacacagcagatgggcacctgggaccacctccacccagggccctgccccagacgcgcagaggcccgacacaagggagaagccagccacttgtgccagacctgagtggcagaaagcaaaaagttcctttgctgctttaatttttaaattttcttacaaaaatttaggtgtttaccaatagtcttattttggcttatttttaatgctttttctcagtgtttttcttctgtttctgagtcacgaacagcaggcactgaaagcagtcccccagccactgccgaaggtcagtcccggaggtgctgcccaggctccaggcagatgcggcagccccggccmcagccagcatgggctggagaaaggctctctactgcacaggggcctcacgtgactgcagggctctggggaggtggggcacctgtagcctgacccccaccttgctgcttccaaagcttccttgcccagggctgrgccttgtggggcaccccccacacygtggtctgcctgcctgcagggtgcccagggagaccctccgcctttagaagtccaagttctttcccagccccctccctgcctagctgcctgcccctggcgccagacctggcccgcaccactggggcactgtgttcccaggggcaccctcctatcccaccagccccaaagcccagccaggcacccttccctgccacctccctgggccctgccccagcagcccagtcggcctcctcgggccttctgtcactcgctcacacacagcaccatgtcagtaaacagctaactcaggcctagggagttaggtaggatggggggagtggggtgggggggcaggagggtgtccccaaagtcaggcttggctggggcgaggcgctgccaacccctgccgccagggggctccaagctccacggcacgatctgctcagggtggcccttcttccacgatccaagccctaagaacaagaggctgggcctgggccctgcagagggaaaggggatggtggacgctgcagccactgagtggcacaggaccacgtgtaacctcagggcagggcagccaactccacaggctacatggatggagatgtggatagaagcatctgccctgggtggtgtgggctgaccccaagggtcttggcaccagggctgatcctgacttgctggtccccgaagggcgttggagggtatggtgcccatccctactctggtcccatttcctcaggcccctgatcccacagtgcctgggacagggctgtgggcccagggagcaccctccctctctgacctctgcctggtctttccgggaatgggccactgggctgctggactggaggccaaagtcctgcggggaacgtgcgggaagagcagagcgtgcaggcagcagagactaacaagaagccctggcccagagggcaggaacaggtggacgaacaaccagatgagagaacgtaccaggcatgcaagctagacccaggaatcaacgggctgaggcttagcgtcccctacggcgtccaccagcctgacygcgggcctgctgggcccrgggggaggggccttcctgctggggtcgagctgcagcgcacgggtgggcattagaggcacaatagagcaggttagttagagctcctggggggacagggcaggggcagggccgaggctggcgatgtaagggttggcctgccaggacagcacaggtagcaccaagggcgcagggagccggaaacatgtggctcacacgggcccaggrcgggcacgtgcacacacacaggcctgcacaggaagccaggggattggcacacagcaggcagcaggtcctgccatcgctggtggaccctggtgggctctcacacgcacatgcacagaagggtgcacacacactagctcacaggctctggcccatgcagggtgtggccgggcagtgttgtccccagtgggtgggagctgcaaacttgtcagtacccacagactgactggcgtgaaggggctgcttcctgggcttggccccacaacccagctgtaccccagggcccagaccagacccagcatggcctaggctgctctccagcaacccctagacacagggcctcaccggggacctgcccacagccacatgaccacttactttcaagggttccttctcagaggcctctcctgcagagctggcgccccgtggcctccgctccctctggtccaccgtggagtatccgtctgtagatggggtaaggtggggcatgaggggcgctctgagggaggccctgtaggagcagatctccctctcagcccagacacaggggactcgtgggacaggggctttgggagacagcccccacccaccctgtcctggagatccaggctggtgccagctctcaccaacaccctgccaactctccagactcccctccacttgtgggtcagagcccctggctgagcactaatccctctctagctgccctgtacctcaccctctaagcacccctaaaccaaatatctctcctccacccagcaccatctacaccccataaaaccagcaggcccacttcaggccttggtcccctcccggcacagaaaaccaaccacactgcatctgcactcacctgggcccagcgcatccatggggatcacatcccggctgccagttttctcgccctctgcaaggcaggaggaggaggcgggctgcatgtggcagccaggggggatcggggcagagaagcccacacagggctggcccaggtagccctagaggctctctgtcactaaggtgcccaacctctgccagctggcagcctcaccccagcttgacaacagcgcggatgctgtgggaagggagtagccaagaggcagagggcagggaaagtggcctatggaagccgtctcagtgggaggcctgactcctccttcaccytcacccaagggtcaggcaactggggcagctggggtcgccaccctctaggctccctaagctccaccactcaccaaggctcttgtccaccagtggcagcgtgctgtcatcgaagcccccaggactcagtgctcccttaggccccttggcagtagcagcagctgactgagacataaaacacagacacagggtgggtgaagcacatggagtgggaataaggcaaagtgagcagggaatggaaggaaggccagggaagccgcacctggaagcgcgccttggtccaaccatctttctgcaaggtaccacgcagctccttgtagctccacactgtctgcagcacgtgtgacgccgccttcgcttcgcgtaccgattggctgtggggccgggggcggggtcagtggtggcccctcccccacctccgcggctccccaagccaccgaccccgcccctccacacctggaggccacgagagccaccaacgctggcaccccgcgtgcctgcaggagcgagcgcgcgttatccaggctgtcggacacgatttcgtggatggtgttgagcaccgccaccacggtgtcttcctccaggcaggcccccggtcgcggcggagcctgtgcattgcgcacattccgcacaagctcagccatggcgtagctccctgaggggcaggactaggtgtcagaacacacctctgccccacctctccaggaaggagcagggatcccgcgagggcgaggggcactgccaggagagcccctggagaccgcctgtgtgcaggcggtcacaggagcccctgtgagcagggcgctgagcttcagagacagggcyggggggactggagctacctccagttgggacagcgcccaagcgagagggccggggcctggactcccaaaccactcatcctccaagcccctccgatgggaccccaaagctgcaggcacagttcggtgcccaggcgtgggctttgcaggcgtcctcaccgatgaggtctttgttgcgccggtccagcgagaggttgcgcagagcgatggcgacggcgcgcaccaccttgtcggtctcagactgcagcagttccacaagcaccggcagcccgcgctctttgcgcactgtggcgcggatgtacrtggcccactgcggaggcggggagagggttgctcagacatacatgccaggcactctcccacctccagacgctgaccgctctctccagctggaccttcctgctcccgtgcccgacaaagccctaccccaaaagctcaacggcacctccaccgaggttttcccaccgtccagggtgcacgcattgcccgcagcccatacacctcttggatcctggggtggtggtgtggcccctcctttccccgccagccgaggcaggagctgcaccagtgaggtgcctgggattccctctctcaggacttgcccaccctgcccgacctggtccctcaccatccagttgccggcactgaggttctgcagagcgccggcggcagcctccagggtgttgaagttccggctctccgtgaggagggagaggtagagacgtaccacctcgggctggtacagcagctcaaagcctaggtgcagggcaaccgccacccacggtcacccagaatctgctctcatccatcatacccctcccgcttcccgcttcagagctcccagggcgtgggtgagctggggccagggatgggtgtggatgagtcacgtaatatttactatcaacatatagtcacccaaggggaaaagcgttcccatttcacagaggagcaaactgaggctcaaatcagttggacctgcctggcagcaggagcatccaggaggcctggggtggggagggaggtgtcaaccaggaacgctctcctagcaacaagacccgcatttcccggtaggtccctgaagctatgcatcctggccacgcccctggtaatagggcccaccctccctggcaacaagaccagcattggccagtaactgagagttgtataaccaaggccacacccctagcaagaggacctgctttcaccagtaactgaagctgtgcagagagctacgccccctagcaacagggcccaccctcccccactgacaatagagcccaccctctgtaagtcaactgatgcagtgcaaccagggcagctgccctagcaacaggaggcactcttcctggcaaccactccaagttcccgggcaaytgaggcgccgtcctgctgctctgcccagtgctccagaaatgaggggtcaaaacagccttccaagcttgcctgtctccaaactggggcttcagcctggcttgggtactacctcgatctcccctgtacccacccagtgacatttcatcacaccctcgccagtcctcatgccccatgctccctctactcctgccctgctgggctttctgctccaacacactccaagcacactccccgctggggtatctgcatcagccctgctctgcctgtaatactcccccacagccctcctgcggctggagccctccaccctggtgacatgcaggctcttccaactggctaggccccaccaggacagacctctctctcaagccagatcccagcatacagctcaataggcactgccctgcccctgcaggtgttcgtctggcccagcctctgaacctggatgtgagcatgcccgcctggctcccagccccctcagataactcagctttgtggctaacacaggaggccctgcctccactggaggcgtccctccaaaccttcccacctcttacgcaccgtgaggccgagcaagccctctgcctctctgtgcctgtctcccccaaccttgcctgacatgacccatggcacttcctcccattctaaaccctcagcaggtgtcctggtgctgaatcaccctccaggaaatcctgcacctaggggcctgtttccccatctgttccctgaggccctccaggcctgcttgatggctcaaagcttcactaccagggcaatcctgagcccagacatcccccagtggagctggcttcatctcagcccactcacctttrgcggcctcagttcgcttgggcaggtctagcgtgtcaaagttccggtccatctcaccatccttctttcctggaagggaaaggtggtgggaggtgaggcagaccccatatggggaatgggtgtatcaggagagttgggcacagttctctcctacccaggccccaaaaggcacccccatgtccaggcctgggcacctgtgggagtggagcaccgttgtcagagtttgggcagacagtttagcctaggggtaggagttggtggcagtggggcctggggatgtcccagccctgcccctaggactcatctcccaccaggtgctgggagctgtaccacagaccctcccggtggctcccttgcaactgccaggtatgtagactgagggaagccaggagccctggctggatggtaggtggatacaagccaagaaactgaaggctgaccaggacaagactcatttgggtcacacagtaaggcagaactagggggaaactcccccagctggggtcaggacattgtcccaggatctactagccaggagaaaccccacagcagcccacctaacatttgtgtagccctggcttgcacacgtctgtgacagtgagcccactgtcaaccactctccccatgtcagatgatgcttctaccccttcagaaggcagcagagtggagccagatgacctggggtccctgccctgctcaccctcatgggacccttgtatccctccgagccacatgatgccccattctatcagagaaacagactgctccttggtgcccctagagataagtacccccgggccctgcccactcttggctctgcccaactctgcccaggtaggcaagtctgaggttacagaatgagccccgtggccttcccacctgccactgtcataaagatggcagccc

SEQ ID NO: 93973 - DNA, 20935 bp, Homo sapiens
acctccttcgccatcccttcctcagcacagccaagctttaccccatggagctgtgaataggaaattaatccttcatggcctcctggagtgtggtgctgagttaggcagtatctgcggaaggacaggccagcattagactctcaggttattctggttggccctggagccctgcacaggactttgcccacctgtctgtctatgcttgtcttggatcccatctttctatctttctctttctccttccctgcaagtcagtgttcccctcaatcaccctgtgtgctcgtgcatctttgttttgtgccattttgtccagtgggttctcctggatgcctctgccatgtttatcctcatttatacaactgtgtgtgtgtcattctgggtgcatgcttttagtgtctacgtgcatgtatgtttcagcatgttcatgttgatacatgaatttatgtgtgcaccaggctttgtggtgtgtatgtttgtgcttgataatgggtatccattccaacttatgtctgcacatgcacatgtgtgtgtgtgcctgacagggtgtggcactgtttctcaatgcttgccaatctgtgtctgtctctgcatacagcatgtgtgcacacatgatttaggggtgtctacgatgtgtatttctgtgtagaacaagatgaatgctgcatattcatatttgtgtgtatacattcacaattgggtgactacatataagtatgtggatgtttttttctttgtttttttttttttttgagacagagtcttgctctgtccccacgctggggggcagtggcatggtctcggctggaacctctgcctcccagatttacaccattctcctgcctcagcctgctgagtggctggggctacaggcgcctgccaccatgcctggctaattttttgtatttttagtagagatggggtttcaccatgttagccaggatggtctcgatctcctgacctcgtgatccgcccgcctgggactcccaaggtgctgggattacaggtgtgagccaccgtgcccggccagtacgtggatgttttcatgtgttcattctggtgtgtgtgtgcagacttgtgggccatgttgcatacacgtgaacatgtgatattttcctgtgctcatctgtgtttggattaaaacagtcctatcccagctccatttatctgcttgaaaaaacccccagaactgcaggaagctttttatgagcataatcttaattgaactcctgattgcaagactgaggttagctttatcatctccattttgcaaatgagttagataagttcccccaaagccggtcataagtgacttgcttctgcatttcacagctaatgagtgtagagtcttagtatggtcttgtgtgatggtaaatttttttttttttgagatggagtttcgctcttttgctcttgttgcccaggctcgagtgcaatggtgcgatcttggctcactgcaacctctgcctcctgggttcaagtgattctccagcctcagcctcccgagtagctgggattatagccaccagacgcagctcatttttgtatttttagtagacacggggttcaccatgtttgtcaggctggtttcaaactcctgacctcaggtgatctgcccacttcggcctcccaaagtgctgggattacaggcatgagctaccatgcctggctgtgaatgtaagtttcatgctgttaatcaccactttggactgctaggccccacctgtttttctttatgaaacattagaaaaactgcttgtactctcttgtgtttcttcaaatacttccatgtaaacatgtaacaaaggatttcaaaatgttagaaaaaaaagtcttttaataggagggagacttgaccttctgtagtgtttgcactttttggaagcttaaccaaagacctagttggccagtatacccctcatgccattggcaatgaagcagtgggggagttggggtactagttgttgtggccagagagtgaaatgtctgtgtttcacatttcagattgatgacaaggatttggggggtggggctgtgggaatgttggctgaaaatagagtgaagaaggtcaaagaagagaagacagtcaagattctttttttctgagtgtttggatagctcacatccatggccatgaagttcctccctaccagtaaaatggcaggacttagagttcagagatgggaaagaagttggatagatgatagggatgaacagctttttttttttttttcttttgaggtggagtcttgctctgttgcccaggctggaatgcaatggtgcaatctttttttttttttttttttgagatggagtcttgctctgttgcccaagctggagtggagtgctacaatcttggctcactgcaagctccacctcccgggttcatgccattctcctgcctcagcctctgaagtagctgggactacaggcgcccaccactacgcccggctaattttttgtatttttagtagggactctgtctcaaaaacaagacaaacaaaaacaaacaaacatgatgcaactatatgctgcctataagaaactcattttacctgtaaagatgcatatagactgaaagtacatagatggaaaaagatattccatgtagacaaaaaccaacagcaagcagtagtagctataacttataccagttgaaacagattttaaggccgggcgggaacggtggttcatgcctgtaatcccagcactttgggaggctgaggtgggtggatcataaggtcaggagatcgagaccatcctggccaacacggtgaaaccctgtctctactaaaaatacaaaaattagccgggcgtgcacctgtagtcccagctactggggaggctgtggcaggagaaccactcgaacctgggaggcagaggttgcagtgagcagagatcgtgccactgcattccagcctaggcgacagagcgagactccgtctcaggaaaaaaaaaaaaaaaccattttaaatcaaaaacattaaaaataaaaacaaaacaaagtatgaacccgggggcgggggtggaggttgcagtgagccaagatcacaccagtgcactctagcctgggcaacagagcaagactccatctcaaaaaaaaaaaatattctggcagcatcacatttcttagtcccagaaggagggccatgtgactaggcaaaaaatgacccaggttccatttcatgcacacaccctctggagcacaaatctccttctctctatcccacttagacctgggtttctctcttgtccctgtatctctttgtttcgttgcctttctctttgttcatctccacctccaactttttgtctagttggatttctctgtgagccatgggtgcgtccactctttgggttcctcttgattctcttctcagccgtatgtcactttctcagtctctgtctcactgaaacttttttcctgtcttttattctttctgcttctatctccctctctctgtttctttgaattgtcttttgtctctgtgtcctccttgacatttatctttgactcactgaatctctctctctctcatctcaattttgttttgtttgctttgttttgtttttgagacagtctcgctcttgttgcccaggctggagtgcagtggtgcgatcttggctcactgcaacctccacctcccgggttcaagcagttctcctgcctcagcctcctgagtagctgggattacaggcgcccgccaccatgactggctaattgtgtgtgtgtgtgtgtgtgtgtgtgtgtgtgtgtgcatgtatttttagtagagacagggtttcaccatgttggccaggctgatctcgaactcttgacctcaggtgatccacctgctttggcctcccaaagtgctgggattacaggtgtgagtcactgtgcctgtcctcatctctattttgatctcgctctggttctgtttctatgcacctcgattttgtctcaatcttgatttctgtctccatcacataatacctggcataatctgccatgctctgaatttctctgcctcaagtcctctgcaattatttttcctctttagcttgcttctactttttagttcaagttcctccactcctggcttcctatctggaggtggaatggtgaagggagctgttctaagagtatttgctctctcccttcccgtctgagtaggaaaaccagactcaccatcaccacacacatgccaccaccctgaatgggtgttaaatgctggggtgtgaggatcagaatgggatggggaggtgaaatctaagagagtcaaaggagatgggctgagctgagtctctactccaagaaagacattctagcagcagatccaagagacagaacgtggcactgtgtgtgagtcactcagttttcgtagaatttccactgcttctggacacaggatgcctcagctcagccagccaaaccccattcccaaaacttacagataccttgagggattcagtttccaagtctgagaatacagtcgtgtgaaaaggacattgaattttgataaatagtatatgtgggtaggatataatatccaggaagttcatttcaggccaataaggctttgaaaatatttggtgcggaaaaggtagtgaatcactttttagattattaaggaacacaatcactaattgcgctggaggagatgttctcctccagagactggggttcagaggtgatccctacaccttagagttttaaaacacacacacgcacacacaccaacacacaatacagcaaagttctttttttcttttttaaatttgatacagcaaagttctgatacaccaacacaagtaatctttgattattgttatttaacatcttgagtagaaaacaagaactttttgaacaaaacctgttcaattgatttatttctcttgttttctaaatcttcagcttactttccttattaacattctagtgttccattacacagtagggtagctgtagttaacgataatacattgcatatttcaaaatagttagaagagaggattttgaatgttcttaccacaaagaaatgataaatgtctcagtaatggatataataattacccgaatttgattgttatacatcgcatacatgtataaaaacatcacactgtaccccacaaatatgtacaattattatgtcaattaaaaaaatttaataactgtttaattagggttatacttaattaagtaacgaacaaagagttttccttgttgtctatcaagactttctaaaacaacatggtctgccagctgtggtggctcacgcctgtaattccagcactttgggaggctaacgggggggcgggtggtggatcacttgaggccaggagttcgaggccagcatggccaacatggtgaaaccacatctctacaaaaatacaaaaattagctggacatggtggtgtgcgcctgtagttctagctacttgggaggctgaggcatgagaatcgcttgaaccctggaggcagaagttgaaatgagattataccactacactccagcctgggtgacagagtgagaatctgtctcaaaaaataaaacaataaaaaaaaataaaacaacatggtttccctgtttgatagatggggaaacaagtcccagaggttaagtgactttcccagtgaagaaaagacagagctgccacttgtacccagattgtctggatcctaaaatcaatagcctaaaaagataataatttgcctcttacaccccaccaagaaattctgttcaattctgttgagctgagagggaagaacagggagactggaaatatgaagaaaggggaatggccccagaggatttccctgtgtgaattcaatttacctttattcaggtgggagattataggttatataaccacccccaatataaagcaatctcttccccgatgacactcaaacccggaaaacttgaatcccagggtgttcagattttggtataagctgatctcccaggacctacttaggcaggatctggtgcccaggacagaacctgttgacctggcaccatggagctgggaggggctgtcaccatctttctggcactccgcttgtcttgcctgctcatcctcattgcctggaaacgaatggataaggcaggaaagctgcccccaggtcctacaccaattcttttcctggggcacctgctgcaagttcgaactgatgctacgtttcagtctttcatgaaggtgagtctgtctgtctcctttaatagggctaaaagcaactaatcctatagccagattcacatagaamcttatgacttctaaaagatagactctcagaaacacagactttgcaaatcttagaattctgaaattccagaatcctaaaatgttggaaacacacattctcagtgcattgaaataagattttcatgatctsaggactttggaatcacagtacattatatttttaaacacaggattctttgactcagcttgtcttagcactttgagacttggtatcatgaagtcttaagattctagaaatttaacatttcagagagagaagtatgaatcttggaatttatcgaatccaggtccmttattttggagatgcagacagtaactcttgtgggaagggatgagcttttgccgagaatgacagaagccaagacttccgtgcctctttcccagtattccttccaagcccagatttaccttggttccttagtaccatgtttatatcmctctaaaatcgccatcctctaaaatcctcaactggcctatgcttggtactccagtcagcccmtcctcttgtgttttccttcactccaagctcagggagaaatacagccctgtgttcactgtgtacatgggtcccggccagtggtggttttatgtggacacgaagcagtgaaggaagccttgrtagaccaagcggatgagttcagtggccgtggagaactggcttcaataaagcaaaacttccaaggtcatggtaggtagcaacaacaacaaaaacaataaaaccggaaatgactgcaatgcactccctatatgccaggttctttggtaagtagtccacatgacttactgyattgactcccttaggagagctgttaacattatactaatgttgtcaatgaaaaagctaagataggccaggcatggtggctyatgcctgtaatcccagcactttgggaggttgaggcgggcagatcacctgaagtcaggagtttgataccagcctggccaacgtggtgaaaccccgtttctactaaaaatttaaaaaaaaattagctgggcatagtggtgggcacctgtaatcctagctgctcaggaggctgaggcaggagaatcacttgaaccctggaggcggaggttatagtgagctgagattgcaccattgtactccagcttgggcaacaagagtgaaactctgtctcaaaaaaaaaaagaaaaagctaagataaaggttagataatgtcacacagtaagtggtaggataattttattttgagcctatgccatctgactccaaactgttttctgtgttatttctgctcctatttttaatggattagtgagatatatatatatatatatatatatatttttttttttttttttttttgagacagtttcactcttgttacccaggctggagtgcaatggcatgatcttggctcaccacaacctctgcctcctgggtttaagccattctcctgcctcagcctcctgagcagctgggattacaggcatgcgccaccacgcccggctaattttgtattttaagtagagatggggtttctctatgttggtcaagctggtttcgaactcccaacctcaggtgatccacctgcctcagcctcccatagtgctggaattacaggtgtgagccactgagccygggggattagtgatattctttatgcacccatagccaaccctcataccccttatagctaaccttatttctcatcttcctatacttatacacatacctaacccataggtctctgcctccttcacttaggtagatctctttctctcatgcatccatctctaactgcccacatccttcaattccaaggaggctcaccacattctgcctatcaatctatctatctatctatctatctatctatctatctatctatcyatccatctatctttctattaccttttttcttctgtccattgatctatattcatcagaaaatccattcattattctttctataaaaatatctttcactctattatctatacttctgtcaattaactttctatttattcatctagtcatcattccttccattcattaatgctttcatcattcatacatctatcaatctctctatccactctccaactgttattcactcagttatttttttatttatccagttccacctctgcttcctgtaagaaacactctttgatctccccctatcattcctgcactgattcccttttcctccacctgagtctggactttttttttttctttcccgaggatcctgcagagagggaaccttactctcttgattgagtcttgaaggttgaggatggcttcctggacagcagagtctagagctttcataatctttccccatcactgcctaagcacagagttgaacacagcaaggggagggaggcagaagcctgagactgagatcttggcaggtgtagctctggccaatggagaacgatggaggattctccgacgcttctccytgaccatccttcgggacttcgggatgggaaagcagagcattaaggagcgaattcaggaggaggccagctacctactggaggagttccagaagaccaaggtatgagggccacaagggggagggccactaggtgactgggtggttatggagctctcagtcacgagaagatgggccttggcgggagaaagctctggaatggaagaagagggaaaatattaagaatccactgagatttctggcagcttccatattaagagtttacatgatcatgcctgtaatctcagcactttgggaggccaaggcgggcggatcatgaggtcaggagatcaagaccatcctggctaacatggtgaaacccygtctctactaaaaatacaaaaaaattagctgggtgtggtggcgggcacctgtagtcccagctactcgggaggctgaggcaggagaatggtgtgaacctgggaggtgaagcttgcagtgagcggagattgcaccactgcactccagcctgggcgacagagcgagactccgtctcaaaaaaaaaaaaaaaaagagtttacatgagctgggcatggtggcacatgcctgtagtgtcagccgcctgtggggctgaggctggaagttgcttgagcccaggagttcaaggctgcagtgagctatgatcatgccactgcacttcagtatgggagacacagtgagactctatctcttaaaacaacaacaacaaaacaattaacatggaagacccttagagaccacttatctagaaactttcatcagtggatctcagggtgggtctgtgagctctcgatatcctacacagattttggtgacatatgactttgtgactcttcttgaagagagtctcaaatttcattccatttgtatatctgtattgtggtaaaaaaaatacataacataaaatttaccatattcaccattttaagtgtccagttcagtagtgttaagtatattcatgttgtgaaaaaaatcttttgaacttttttatcttgcaaatgtgaaactctatactcatttcattgtgtttttaaaggagttcagttccaccaaaaaataaggtctagaaacactggggtctatagagaaaagacaggctgaaaacaaacaaacaaacaaacaaacaaacaaacagagaaaattagataagaggtagaaatagagacacattttctctacacctgaggctccttgcctggtctctatgggtgattaacaggtctatataaaagcttcaaatgcccatgtaccccagaaattattcataaaattgtgtatttgtgaatatgtgcattattctagagaaattgttcccagatctactgatcttgttttacggaaggtgtaggtgagggcaagggaaggattttgttttgttttgttttgagacagagtcttgctcttgtcacccaggctggagtgcaatggcatgatctcagctcactgcaacytccacctcccagtttcaagcgattctcctgcctcagcctcctgagtagctggtattacaggcacctgccaccatgcccggctaattgttgtatttttagtagagacggggtttcgccatgttggccaggctggtctccaactcctgacctcatgatctgcctgcctcagcctcccaaagtgctgggattacaggcgtgagccaccgcgcccagcccggaaggattttttaaattgcctaaatggaattatcggtagaactagacagaattcaggaacttttataatgtgtcccttatcccacttttctccaaatatgagtctctaacatcaacacatttaagtaataataataaaaaataatgattaagctcaactagcttttcttgagtgcttactgtatgccaggcattgtgctaattattttatatggataatgatactgaatcctcatgactcttcaccctttagaacttcaggacgtggaaacacaaaatccccgactttgggaggtcatttaacttaatcttctacttggtgtctgcggcctgtggctgctgtaacaaattaccaggaacttagtcatctaaaacaacacaaatgtattatccttctgttctgaatttcagaagttcaaataggctttcactagctgacaccaayggaccatctgattctctgccttttcsgggtgttaaagctgtactccttgtaatcctgggttcacgactctgtcctccatcttcaaagccagcagcgtagcttcttcaagcctctgtttgcttctggcatcacatcttttattctttttcattattttggagagtcttcctctcttgcccacgctgtggtgcagtggcgtgatgtcagctcatgcaacctctgccttctgggttcaagygattctcctgcctcagcctcctgagtagctgggattacaggcatgtgccaccacacccagctgattttgtatttttagtagagacagggtttcaccatgttggctaggctggtctcaaactcctgacctcaggtaatccaccctccttggcctcccaaaatgctggaattacaggtatgagccactgcgcctagcctcacatcttttttttcaaactccgattctcccgcctctcttttatacagacacacaatattatattgaaggccaatcttgacaacccaggctaatctcttcatcccaagattcttaatttactggcattttcaaagtctctcttgtgtttttgttacccttgtatacatagccttccaggcattaggttttagagacttggaggtggttatctttgatggacattatcgagccaactgccctgccaaagttaaatagaatccgtctccaatcacttctgatctggtccatttgggtaactttagtaatgaggaactcactacttgcttaaggaaaattcccagttttggcccctctccttaataatgcaattcaaaacaagccaaaggatttctcctggtgcagatgagagatgctaacacacttccactcaaatgtttctagtgtcacctccattgtctgagttgtctttcactggtctaaataatcaggccgggtgcagtggctcacgcctgtaatcccaacactttgggaggcagagatgggcaaatcgcttgaggccaggacttcgagaccagcctggccaatatggtgaaaccctttctctactaaaaatgcaaaaattagccaggtatggtagcgcaaacctgtaatcccagctacttgggggactgaggcatgagaatcgtttgatcccaggaggcaaaggttgcagtgagccaagattgcactactgcactccagcctggggtacagagaaagactccgtctcaaaaaaaaaaaaaaaaaaaagaaaagaaaatcaaatatttattggatgcttctatgtgccaagcactgtcctagttccttgccttgcataccagactttatgtaatgtttacaactctatgaccttgtccaaacagcacactcattttgaagatgatgaaacaagttcagaaggtgaagtcactcatccctaaagygcagaggagtaactccagcagtggtgatcttaatcagtcacataaccgcttgtcatttgtgtcaatcctgtcctagtcacctagcatgcctctttcccattctttaaaaaacccatgtatgagagccaagctgggaccatggctttttggttcttttaagtaaagaccaaatgtcctggcagcrttcaagactccaagctgcctgtctcccgatgtctgatgagtaattgagcatcaccagtgtgtcagttgttaagttaaagaagcgaccaaacaggcctggtgtggtggctcacgcctataatcccagcactttgggaggttgaggtgggtggatcacgaggtcaggagtttgagaccagcttgaccaacatggtgaaaccctgtctctattaaaaatacaaaaattaactgggccggtggcaggtrcctgtaatcccagttactctggaggctgaggagagagaatcacttgaacccaggaggcggaggttgcagtcagccgagattgtgccattgcactccagcctgggtgacaggctgtcaaaaaaaaaaaaaaaaagaagggagcaaacatgcatggcttgcatctgagatctctttctgctggagcttggaatgcatgatttgccctggcttccctaacaaaaacacctgttttattttgttttgttttgttttgtgcccttgtccgctatattttctggccccttccagctaagattcacgaagagattaaccaggtgattggaccacaccggctcccaagggtggatgaccgggtcaagatgccctacacagatgtcgttatccatgaaatacagagactggtagacatcgtgcccatgggtgtcccccacaacatcatccaggacactcagtttcgaggttaccttctgcccaaggtggggttgcaccctcattgcctcccttccactgcactcctctctctccctggttccctacctctgtagcccaacactgatttctcctaactgccctcattttcaccccagggcacagacgtatttcccctgcttggctctgtcctcaaagaccccaaatacttccgctacccagatgccttctatccccagcactttctggatgagcagggccgcttcaagaagaatgaagcctttgtgcctttttcctctggtaggtttctctggtctgacttcctccaggcatgtgctaaatccacccccmagccactggtctgtatttgaagttcaagtcacagtgtgaatttgaaggttatatcatagaaccataaagttttagaatcccagaattagtaaatattaggatgtttgactctgataattagaaaaaaaaagttgggatggtaatagcactaaacagggcataaaccaactggctggctgttaagaacaaaataagacatattttctatttttccagccagatagtctctgaacctttgccattgatcaatgaaagcagccatagacaatatgtaaatgaatgagyrtgyrtgtgagcctgaaaaactgtttacggacactgaaatttgaattttgttttatcttcatatatcacaaaagagtcttttttccccaaccattttaaaatgccaaaagcatcctagtttgcaggctgtatgaacacaagcagcagggcaaatttgcccaacagacactcatttgcctactcatgtcataaaatctttatgcagcaacattttaagtgtatgttggcatggcacagtggctcatgcctgtaatcccagcactttgggaggccgaggcaggtggatcacttgaggccaggtgttcgagaccagcctggccaacatggtgaaacmctgtctctactaaaaatacaaaaattagccaggsgtggtgacaggcgcctgtaatcccagctacccaggaggctgaggcacaaaaatcacttgaacccgggaggtgtaggttgcagtgagccgagatcatgccactggactccagcctgggtgacagagtacgaccctgtctcaaacaaacaaaaaacaacaacmaaaagtgtatgtcatttggaacctggagtcaggacagtggttgggaatctggactccactccatcatttagaaatggtggggtcttgggtgagtcacttcagcccccatctgtgaaacagagattaatccctccaaacaattggaagagtggcttataaacagtaagtgttattacgggtgagttttcactttttttcctcaccagtgtctggcacctaataggcatttgacaaacccttgaggaactgaaatgaacacaaccttgaaactcatggatcctatagaaccattccgtcttggaacgggatggaatcccagccatcagagaagtagcaggtcctagctgagcactaactatagatacccactaagcctgtgtaacacccctttataaagcagtcacagtcatgagccctgatgtgcggatgaggcagctgaggcccagtggggtggtcagtccagacacccctggcacccccatgacctgtgcaggtgcaacccttccttctgccctcccctgtgcctgcaggaaagcgcatctgcttgggcgaggccatggcccgcatggaactctttctctacttcacctccacccttcagaacttctctctakgctcgctggtgccacttgtggacatcgatatcacccccaagctctcaggctttggcaacatcaccccgacctatgagctctgccttgtggcccgctgagccacacctcctgcggggcaaggaggaagtggtgaagaatgcagctctcctctcgtgttcaggagcaccccctcttcctcatcttactaatcctcaagcatccctaagaggaggcactatgattacagagtcagccagggtcacctgagaatgtacagctgcgtgtcttcctctcccgtagaagagcaacgccctgtgcaagatttgcacctctgcctgcaggtttcatggtcacatggtcaccgttgcttaggtttctggctgcatcaaattattactgcagtccctgtgtcttcatgttgtccctttttgtgtgtgctctgattttgaccaaaatgtagtctaaaatcctttctccttggttctcatctttacccaccagcccccgaaaagtgaacaaagacctcaagtctgttgagcgtagcaagtttattgagtatggtgtgtgacagcgatgtagggcacagccaacagcttgaaatgtctttcttgacttgttatgagttatagtttctgccagctgctctccagtgacttcccctgggtaaaatgccccatcctcacccatcttgctgactcattacctttctccgccatcatctcttcttctaatcttcctttccagttgctctcagcacaactcccaattccaaatactccccagtccgtttgtttgtttggagatggagtctcactctgtggcccaggctggagtgcagtggcaccatctaggctcactgcaacctctgcctcctgggttcaagggattttcatgcctcagcctcccgagtagctgagattacaggcacgtgccactgcatctggctaatttttgtaattttagtagagatgggttttcgccatgttgcccaggctggtcttgaaatcctgacctcaagccatccacccaccttggcctcccaaagtgctaggattacaggcataagccaacgtgctcggcctccccactccatttttgaggatagctcagttatccccagcttctatcattccctttccagactccattaactgacaaaaacgttccctctttttcatttattcagccaatatttactgaatacccaacaagtgccagcgtagtcttcagggacttgggatccatcagtaagcaaaacagacaaaaactcctgccttcagggagctaacattctagtaaggaaggtggacaataaagcatacatgaaacaaatatgcaaatgacatactgcattagaaaagcaaggctggtaagtgggatatgcattctgtgattggaattgcaaatggatggttaggggtggtttcacaaggtgatggggcaacaagctatgaagatatctgggaagggagtgttcctggcagaaagattaaccaacagcagtggccgggcgtggtggctcatgcctgtaatcccggcacttcgggaggccgaggtggtcggatcgcctgaggtcaagagtttgagaccaccctggccaatatggtgaaacgtatgtctctactaaaaatacaaaaattagctgggcgtggtggcaggtgcctgaatcccagctacttgggaggctgagacagagaattgcttgaacccgggaagcagaggttgcagtgagctgagattgtgtcattacactccagcccaggtgacagtgtgagactctgtctcaaaaaacaaagcaacaaacaaaccagcagagtcctaaggcaggaggctgtgtgcatccaggaatccacagggagcaggtgtagctcgcatggaggaggaagacagagtaggagtgaaggaaacgaggccagggaggcgatggggaccagactgtgtggggtcttgtgggccaaggtgaggtcttggcttttaccctgagagtgattgaggtatttggagggatggtgagcagaggatgacatgtacagacatattttacagggctcacactagctatcatatgatggatacaaaagccaagacctattagcaggctactgcaactggtggtgttgactcagacccagcagcagcagtgaagctgggcagaatatggtagatttgaaatctgtttcactctctgagatggtggggtttgctacggtattgtatatagggtgtgagagaaagagggagttcaggcaggagtccaaggataggatctcatctttgatcacctcttcttcaacctgtcacctccagggaaccttgggacccatgacagtcagggttcctttttttttttttttttttttttagacagagtctcactctctcacccaggctggagtgtagtggcatgatctcagctcactgcaacctctgcctcctaggttcaagtgattttcctgcttcagctccctgaagtagctgggattacaggcacgcacaaccacgcctggctgatttttgtatttttagtagaaactggatttcaccatgttggccaggctggtctctatctcctgacctcaggtgatccactcatctcggactcccaaagtgctgggattacaggcttgagccactgcgcccggccagggttcctatttttaagcaatataaagtgactttggttattttaaatagaaaggctgttagctactggaaggtgattgtttagctcacaaaattaacagcaattctggaaaaatagggtaagaatatgagtaggaaaaagaggctgtggtaggggaccaacagccaaggtaatgttcaaagctatctggtaggacctgctgccacaccacccatctcctgtgtactgaacacctgacccaccccctgggtactgccatgggactctagacccactgatgccactatagatgatttcctgattgtgtctgtgtttttgtctcacatcctcatgattaagagttccagacatctagccacatgttaaaaccttagggttcaaggtgaggtgaggaagaatgaatacctccttcagctgttgtagtgggaggcaaagccttgtccctgatcaagagccacacaataggaggtactcagaaaatcagaaaagagttttgagactgtgtgtataataaacaataaatgcggccaggcatggtggctcacgcctgtaatcctaggactttgggaggccaaggtgggcagatcacttgaggccaggagttcgagaccagcctggccaacacagtgaaaccccatctctactaaaaatagaaaaaaaattagccaggcatggtggtgcatccctgtaatcccagctactcaggaggctgaggcatgagaatcacttgaacttgggaggtggaggttgcagtgatagtgtcactgcactccagcctgggcaacagagtgagactgtctcaaaacaaacaaacaaacaaacaataaatgccattatatacattatgggaattagatcctccgggaagctgagatttagacggagttaggggtccatcattttattggagggaggagggtaatgcatgtgaaagaccaaaaaggaaggaagcagatgacactggtagcagaaaagtcttcagaacaggatgcagatccaacacttgtgaaagaaaagaaggaaggaaggaggattggacagagacaggccaagaccaccaggcagagataacagacccataatccagagaaaaatgctgttggggatggtttatgttggacagatagggtcatgccctggatcccagagtccttaattactatttggggcttccttggaaaagcatgggttccgctccacactgaggtgggtcctaatggtgctgcaactggagactctcagctcactgcccttattgaagctgattggaaagttctccatgaatgaagattcaagtagcacatccctatgcccaccacagacaccaacatacaaacccacatcattaaagccttggcacccccttctataaatgcagcatctcagagctacaaacacacctcgcaagtacacagtacaatgggcatcaaacatttttagctgtgaaacgttttttaaaatgatcttacttgcaaatagaatacataaagcaggccgggcgcgatggctcacgcctgtaatcccagggcgttgggaggctgaggcgggtggatcacctgaggtcaggagtccgtgaccagcctggctaacatgatgaaaccctgtctctaccaagaaaatacaaaaattagccgggcatggtggcacgtgcctgtagtcccagctactagggaggccgaggcagcagaattgcttgaacctgtgaggcagaggttgcagtgagctgagatcacgccactgcactccagtctggtgatagagcaagactgtgtcttaaggaaaaaaaaaaaaagaataagcaggagagagaattgttgatctctctttaggtaaagcacagaagagctataggtcctcaaaatagccttcatttctatttatgacgtgagcctattagaaagttcctagaggctggcgcggtggctcacgcctgtattcccagcactctgggaagccgaggtgggcggatcacgaggtcaagagattgagaccaatctggccaacatggtgaaagcccgtctccactaaaaatactaaaattagctggatgtggtggcacgtgcctgtagtcccagctactcgtgtggctgaggcaggagagtcgcttgaactcgggaggtggaggtggcagtgagctgagatcaaaccactgcattccagcctggcgacagagtgagattctgttaaaaaaaaaaaagttcctagaaattctgagaatctaagacattgtagttattcaacacacatcgggtccttccaaggggcccacggaaggacctaatgacataatggtgaccaggaaaagctcagtgactcaccacatagggctcacagcccagcagggaagagtgctccatcctttacagtgacggcccagcatagcccagcatagctctgatgaaggaagcacggagtagaatgtggaggactgtgatggaggaagcccaggtggattaggtaacaccaggaagtatgaggcaggttagagggaatccgtactcctgctatcccctggaagtaattcatttaattagagtaaacatttctcagaaactaggtgaatcaattttcttcctagaactaatcaagacctacaagtcagagaggacattttctttactgtgaggtttttttctttatatttgtttcttttctttttgaaaaagcctttattgatataacttacagatcataaagtgtacaattaagtgggtttgggtgtattaatcaatactgcaaccatcaccatggtcaattttagaacattttcatcacctctacaagaaacctcataccttctaggtcttaccccttttcccccacagtcaattccctgccctgagcaaccacgaatctacttttctttgtagattcactttttttttttttgagatggagcctcgctctgttgcctaggctggagcgcaatggcacaatctctgctcactgcaacctctgcctcccaggttcaagagattctcctgcctcagcttcctgagtagcttggattacaggcacccaccacgacgccaggctaatttttgtatttttagtaaagatggggtttcaccatgttggccaggctggttttgaactcctgacctcaaatgatcgtccggccttggcctcccaaactgctgggattacaggcatgagccaccatgcctggcctagattctctattcctgacttgcatataaattaagtcatatattatgtggtcttttctgactgcgttctttcactaatacttttttaaaggttcatgctagttgtagcatgaagttctgcttcattcctctttgtggctgaacgaaattgcattgtatggatatatcaccttttatttatcagtttatccagggatggatttattagcttcctagggctgcctaggaacctaggtacatataacaaagtaccacaaactgagtggcttaaaaaaacaacagaaatgggctgggcacagcagc

SEQ ID NO: 93974 - DNA, 88277 bp, Homo sapiens
  misc_feature (1)...(88277): n = A,T,C or G
tgaggaagccttgagaatgaatggaagccatgagaaatgtgaaggctcatagtgtgtggagctttgctgggagttgttctggggagagaaggcaaaagactttccagactctgcagcatggatagggagacaaggaagagaggcaaaccatggcagctgctgaagggagggtgtggatcctggggccctgtgcacagctgaggctccagtctcaggggtgctgtttatgcacaggggacccaggaagccggttttctcccagtgactttcagtcctcagaacccctccctacctccagcatggcctgtccaaaacaaaacacatctgcatagatgtagctcaggttgaaattctgacgctggagcagagccctcccaggaggcacctcaggcacatttgttactgcttgttccaaggaaacctgagcaggctgcctgggggagtgaacctggtgggggaagttggcgcttaggcattactgagctgtgtgtgaatctggggcacagggctgacctagaggggagagggctctaagcaggtagactggtgatggaaagtaagaaaatggaagggaccgaaagtactgctctattccccatctgttctcatttccaatccagggagggaagaatagagagcaaaagaagagctgtgagtctcacttaagtggacaggtagaacttttacagagctgggtacatgttcaggcatacaccatcaaggaagatctgagttaatccagaaaggctttttagaagcattgagctttaagcttgataaaagatgaggagagcctggaatgagcacacatatgatgagagcagggttggcaactgcgggaagaatccatgtgtatgcgtgtgcattttctacccgttgctttatcatttaagggtctaggaaattaaagcctacagcctgtctcttgtcctgcttgtctcagatacctcctctctgtatttttctactgtttctgcccatgatttggttggtctctgacccatgaagtctaatttggagcattcacacactgactgcagctctttcacttctttctccactctgccccacctctgtgctccctcagaatatgtgtagagctgctttgaatggctgttaactccttagactgctaacggattcttctttctctgttctgctgctgctactacctctgacttgcctgtcctcattcagtgcatgatgggaaaggtattagatttactgctaatgaggacattcgtccggaaaagggtatgttgtacaccgtgcagatatggatctaacatgggctaacactgacccctgggagctagaatgagcaactcgtgctgggggtgggggaacaagctgtcaaggtttaggagctctatctcaagtcttagagatgggtaatgccttcatatagcccaggaaggggttctgttgttgatctctgtcgtattctcagcattctcccacccctccacctcaggacaaagaaggattttctctggggtgtaagattgtggtggtgttttctttttttctttttttttttttttttgagacggagtctcgctctgtcgcccaggctggagtccagtggagcgatctctgcccactgcaagctccgcctcccaggttcacaccattgttctgcctcagcctccctagtagctgggactacaggcgcctgccaccactgccagctaatttttttgtatttttagtagagacggggtttcaccatgttagccaggatggtctcaatctcctgacctcgtgatccccccacctcagcctcccaaagtcctgggattacaggtgtgagccactgcacctggccaggtgttttcttaaaatagggtggggtctctgctaaggggagcctgtagattggctcttttcagagattggaactggggagttcattctatagaggggcccaggtttgagggggatgaagtatttcagagcacagcagcctcccaagcagggacctctaggaatcctgggcataggtgggaggttgctgcttttggctagagaggacccacatttttccattaagagacactaccaggtcaacataattcccagacacagatacaaggtgatggcactgccctaccccaacgtctttcagttaaaagtccttcagcctaggagataagagttttggggatccttgagagagagtcttagtgcacttttggaaaatgttgcgcctaagatgctgtcagcttaacttgtgttacaagacacagccttgttctttatcccatttctttcccttctcctattgcttacttcccatggttactgtggtgattgcttcttgcttttgggtatagggtggtgacctcctcacccctcaggtttacctcctacagttctccaatggggaatcatctctccatttgtccctcagggtctggtgtggacgatcctgtgggagaagtctctattcaggtggacttgtttacacaccctggtactggggagcacaaggtcacagtgaaaggtgagtgatggacttacaggtctgccctttccttgcccagtggcctcactcatcactcaaaagcaggggctgctcatcccagccctccagctcagccctcctccamggggaaggtcacctggggttcaagaactgggaaatcctggtgggatccctcacaggtttcccttgtttgggcagtggtggctgccaatgacctcaagtggcagacagcgggtatgttccggcctttcgtggaggtgactatggttggcccacaccaaagtgataagaagaggaagttcacaaccaaatccaaaagcaacaactgggcccccaagtacaatgagacattccacttgtaagttacgggggggacatacaggactctgggatgggggtaagacttgaggggtggggggagaggagggcccggggggatggcagactggggtgaaatcagctgaagactcaactctggcctcataacttctatcttgtgctcacagcctcctgggaaatgaggaggggcccgagtcctatgagttgcagatatgcgtgaaggattactgctttgcccgggaagatcgcgtgctagggctggctgtgatgcctctgagggatgtcacagccaagggcagctgtgcctgctggtgccccttgggccggaagatccatatggatgagacaggcctgaccattctccggattttatctcagaggagcaatgacgaggtggcccgagaatttgtgaaactcaaatcagagtctcgttccacggaggaggggagctgaacaccttcgactcctgtgccaatcaggcagcagcaatttcacaaatcagggccagtgggagttagctgtgtaaccggcttagggtctttgcagtcaagaggctgaccccttcagttaaagatatttaaggaaaaatttggggtggtgataatatggcttttcacagaaagggtcatgaagccctggcccaacaggactgtggtactaggggctgggatgtggggttaccacatggagagattttccattaagagagaaggacaaacatttctgagagtgtcagccattcttggtagacacctctccactcctcatcccacctctacccatctccatgccacaccttatccagttagacacatacataccaatcattagaagaacaagtttagaaggtgtggaacttgtgcctggctggctgggtagtcagctgagcctgttgctgagcccggtggtctggattggagtatggccagggcaggagtacacagaatagaatttagactgtcccttgagtagaatccactgattttctgtggctccagtgagaacaaggctttgaaactgaacaagataacttctagaaatgaactgtactaatccctttccccagattgtatcatgagtagaatcaggttcacgtggtgcttcaaagccctgagaagaatatttctttggaccccaggcactaggggccacctgcctgggagtctccctgcctcactcctctaggcaggggagtgatgcttcaggacgtgacaggctgttctaacatgtgtctacctgagggctagttgaaggatccaggagtattttcttcttgrgtgggccctgaacaaagccaaaaattgtagaaaccagtctagaaaaagtcctgctcatctgtggccactgccttctagccgtcctccaccttgcagaaagaatctagcctttggtctctctctctctcatcggggtcatttgctattcccctctgatattcaaccctatagaaggagcctggactctgatccctctgtacaggctggatggaaggggccctccacacttcctgggaggtcagagacaaactgtttcagagagtcagatggacttcccaagacttgttgagagatgtgacatggttcttggatttcctctgtagcagcctcctggacttcctgaggactcgacattgtccacagatgtactggccattacatgaaacaagaaaccaagcatctttgctgttgttaattattatatgtgccattgttacaggagattataggctagtctgtaataaattatcttatagcagcctttggggtttggtaattctgctaatgtgtggaaagccatggaaatgactgtcctttataatggtagattttggcctaatggtcctttgctgcttcacactcctccacccccatacctgacagccagtgggtgaagcctaaagtggttctggataaacaccactgggctaacatcctgtcctagacctgagaccaccaatctaattaacagagtcatgggacctacggcaccagcttcctacaaaaggtccaaaagagtagcaggagaggtattctggtgaaaactagtccatgcttctcttccctttgtctagaatcactaggacagatcacagcctgggttgtgaggacaaggcaggggcccactggggagaggtgtgcctgcccgtcttggcagaggactgaggctgccacagacaggacagaagattaggcttaggactgtaccttggactttcattcaggctctattcgaggaagaagagctgcagtagaaagcccactcccaaaggggaagaaataaggtaaaaggcctcatggcgtggaaatgggaaaagctgaaacaagaaagagagtgctcacctactctcaacctgcactaacactacttgtggggcagggactaatggggcaccagacagggaactagctccgtttccactgcttgctaaataaatccttagagttcagttgctcatttaaaaacttcctcctccccgctcctctcccaagccagccacttaacatttctgcctcaaaattacctcttgaatccattgggtcgcctcaagttcccaccaccacaagagtcgtggcagcttttaggtcctcatgcctgagttactgtgataatcccctgcttccgttcttaccctgctctcttcacgcactccaatataaagtccttctcctattaaactattcagtggtcacccatagcctccaggctgaaactccaagaccctccaagatagcgcagccggcaccgccccccttgcccctatcctgcagctgttctaaagtactgccccggcaggtccccgacaagcactgtgtgctcctacccctccgtgcctgcacatgctgctccccttgctggaaaatctgccagccttttccactgctttctaggctctgctatctggacgcctccccacagcactctacattgttataatttacttgtctctttcccctcatcagcctgtgatctacccaaaggcaggatctgagtgttgtatctccatttccccagcggccagcatagttcgggtacttcaaagccagatcggcccctaggggccctctccatggagaaacggtgggtctggcacctgagggtaggggtgtggccagaggcgggctcatgggagatgggcgtggtttgtgggcggggctctgctctacgccggaacctgggtctctagggcgtctgcgcaggaaggtgcgttgagatggcagttgccggagttggaggccgggcggcgacggtgagcaagaggctcccaaagtgggtgcccgagtagaagttatcgccttctccctcccaatattccttgaagagagactgtcccctctcagtatttccagtagctgtctatccttatactttcttgagacaactccccatattcgagtatactggttttccagacactcccacagaggacatatttgtcgagattatctaaggaaggggagctttatcccccatgtaactcctaaagggcacacatttttccagttatttcatgaagagatacccccaaagctccagcaattgcacattcttgttaactcagggagttttccacttttccagcactgtgcagattctcgaagaagtcataatccttgtcccatacttgatctgaagtggcacgtttgctatcattccctcccactctttggcataggatacctactctagagggaagartcaaactctggctggctacccatggcttcagcaagctttcagatttgaattagccgctaatttctgtaggctatatctaatcagaattagaacagaagtacctttaacaatggacttttaagaaagaaaaatcacatctttcagcgtaagttgtcgcngtcgtattcattgtgaatattcggactaactccctgaatgatcctcccaagcccagaagcagacaggcaaagttgaagaagcaacaaatagtggagatggtattgaagtagragtcagaagattgggcccagttctgctacattctagtcaggagatgacctttaacttctcagagcctcaataacttgaatctgttatctaggactaataactcctgccatgtctacctcagagggatcaaatgggctcatatatatgaaagcactttgaaaactatacattttctctaagtgtataggggattattataaatgatcctctgagttctaattaacttccaaggaatttgtcttgcttggtactaggttcaaatgcaacagatattttttgagcgcttactatgtgccaggtattcatctagacatgaggcctagcattgaaccaaaagagacaaaaaccccttmtaaatttaagaatgagtcgtcagcatattaagtgcctactcattacccagtgcagcgtcaaagcatggtgaagtagtaggaagaatctgtattctagatttaactctgccactatatagctgtgtgagaaagattttttccctgtgtgagcctgaacttcctcatctgtaaaataaggaagttaagcaaggtaacctctagttttctagtcttgactcatctgtactttaggggacctgaaagaaattgattaaaatacatatactttattggccttttctgagttgggttaagaatggagagaaaaataggaagcaaagaaggatatgtctgtatagcaaatcgtggggtttgataaagtataatttttccaagtattaaaaaatttgacttttatataaatacgaaattaataggtctccaatattttatttattaattaatgagggaaccagtaagatattaagatcagttcaaatgaaaaattaagagctaaatatttataggcaatttaataaaggaatgttaaaatacgatttctgaatgatatacaaaactaattaaggtcctaaagtgcaataagtcataaattttggagtcatcttttccaccagacataaaacatttttatcactactagatgaaaatctataagttaacctctgccctaacgagttataaaatagtccagtcaatagaaaactaatcaaagatataaacacaaaactgtactaaaagatcatccaataatttatttcacctgtttctaggtttcagatgacttttctgacaattgtagtcatcaacttcaacttagttgtcaggaaatgaaatctgtttcccaagctttgaaactataactttatgatgaagataaataaagtgaattccaaactaccatatgtgtcttagagatagatcattttggacttcagggatcaagttccaagtttcttaagaatgtgtttgaatgacacagtatcagcatgagaaattctcatattctgaatctttatttcctttatagaaattccatggaattatagttggtctactctgcaatgtctctatttaaaagcccaagtgaggacagacaagatgaacgtaggtaaactcaggaaaatgtatctgagtatgtcattattattacctctgaagtgtgtgtgtgtgtgtgtgtgtgtgtgtrtatacatgcacatatggcagatcaacctggcaatcagattgttaacctaccaaacaactgatcaggaaaggaaatatatttttcaaaagtaaatactttgtacttagaagtacaagctccactgttttatcatctgaaaatcctaatttgagtactctcttaacttttatatttggaaattcaccagtaaagcttgtgtacctttccttctctccccattcttcataactgcctcctgctaaaaagaggtgatcagtgtgaaaaaaggctgctgaggcagataaggtcctcctttgcagcctttttgtggacagaacaaatggatctgtctctgtagtaagggaggatttccataccatttctgtgctttcctttggtgaatcaagattctaaagggaggccgggcgtggtggctcacacctgtaatcccagcactgtgagagtccaaggccggcagatcacttgaggccaggagttcaagactagcttggccaacatggcaaaacctgtctctactaaaaataaaataaataaataaataaataaataaataaataaataaataaataaattagccaggcatggtgrcacatgcctatagtcccagctacttgggaggttgagggacaagaatcgcgtgagcctgggaggtggtggttgcagtgagccaagattgtgctattgcagtccaacctgggtgacagagggaaactctatcttaaaaaaaaaaaaaatcctaaagggagcaggaataatcacactccagccatctttcagaatggaactgcctgttatgtaagaacaacaacaacaaattatttctaatgtgaaattttgaaaaaggaagatttagatttaggcttccttttgaggaatggagaaagtgcagaatgaaatcagttcactgattgaaggtcacagtgtactttctttctttttttttttttttagtaacacggagtctcgctccgttgcccaggctggagtgcagtggcgcgatctgggctcactgcaagctccgcttcgcaggttcacgccattctcctgcctcagcctcccaagtagctgggactacaggtgcccgccaccacacctggctaattttttgtatttttttttagtagagacggggttccactgcgttagccagtatgttctccagctgacctcgtgatccacccgccttggcctcccaaagtgctgggattataggcgagtatactttctttacttgctgtcattgggcagttgtccgatttcatcctggaggaagcccatgtcaaggacactggccctggttccagaagtagaaagtcaggaaacttccatccaaaggaaaaccagggagtcctctgctaccctcaggagagctaaagggctaaaggacccagaagataatcaactgctctgcatattcttatgaacagaaaatatggagagccagaatactttagggtgtggtaagttccaggcaaatgaaaaatgtaataatcatcaataaagactgatcaattcattcgacaaatatttattgattattaaataagtgcgagccactgtgctaggtatggcaatacaatggcaacaaaactagacagaatttctgctcttagcgagattatggtttagcgaggggaaacattaattaacagcatatttaatagcaccaataaatataaaatatctgccataaatgcagtgaaataaataccatatgggaagtatagtagtcaagagcatgaattctggagtcataccgtctaggtttgaatcctagctccaccacttaccacgttatcttgggcaaatctcttaatttctctgctacagttcctcctctgtaaaatggggataataataaaagtgctgccacataaggttgctgtaaggattaaattaggtaatatttataaagcatttaggacagtatctgccacatgataaacactggtaaatgtgtaaaaaataatcaaaataatctataagagcttgacactttcaatcagaaagataattaagaacttcatctataaatgtgtgttatttcaaaagccaaaccttttaccaaggaaaaagagttgaaaccagttttcctggtaaatccctacaggtaggctaggactacctattgcaggtagatttactgcttctgctattttgagcagtaagcaattaatactggtttacccaagattttggcctattccactgaatttacaaaacgacagtgctaaacccaatcatttggcaggtaacactattttgaatattcagaatcttcaggcctattctggttggaaaatctacagtacataaatactggccagttctaacatcttggttgtctaccctctcctttctattttcttttctttttctttctttcttttttttttttttttgacagagtcttgctctgttgcccaggctggagtgcagtggcacgatctcagctcacagcaacctccacctcctggttcaagtgattctcatgcctcagcctcccaagaagctgggattacaggcatgcaccaccatgcccagctaattttcgtatttttagtagagacggggtttcgccatattggccaggccggtcttgaactcctgacctcaaatggtccactcgccttggcctcccaaagttctgggattacaagcgtgagccaccatgccgggcctctcctttctattttctaccacttcttagttcagcctttcatcattttaagtgttgactattatagccgtcttttaagtggtctttctgtctgcactccgttcccctgtaaatctatcatattaatgtttctgaacttccagtttatcacattttcccctactcaaaatctttgtaggattctctgagataaagtttaatatcattatcctaatattaaagtcctgacttgaagttcttgttttctgcctccttcagattttcgtacttactgtactatcatacaacttgtctagtctcaatgccaaccctttcattaagtcctttttcctgcctacagaactgtcccctgcatctctacctaattaacctgtgttcgtctcttgagtttagtgcaagtccttctccatgaagctctttccaacaattctgccctgcccccctttatctctccttcttgaattcctgtagtgcttgggttctacagtgtttgtttgtttgagacagagtttcactctgttgcccaggctggagtgaagtggtgtgaccttggctcattgcaacttgaggctcattggttgagcctcctgggctcaagtgatcctcccacctcagcctcccaactagctggggctaaaggcacatgccaccacacccagctaatttttgtacttttttatagagatgggatctcactatgttgcccaggctggtctcaaacttctgggctcaagtgatccacccacttgagtgggaggccactcaagtggcctcccaaagtgctgggattacaggtgtgagccaccatgcctggcccagttttttaaaataatagccttattgagatacaattaacatgtcacaaaatacacccttttaaagcatgtaattcagtgatttttaatatattcagagttttgaaaccatgaccataacttaattgtagaacattgtcatcatcccagaaagaaaccctatacccgttagcattcactctcagttctttcctctgctctcctataccctggcaaccactaatggatttttctggacttgacatataaatagaatcatataaaatgtggccttttgttactagcttccttcacttatgttttcaaggcccatccttattgtagtatgtatcctttttatggcggaatactattccagtgtttggatataccacaatttgcttatctcttcatcaggtgatagacatttgaattgtttccatttttttgggtattatgagtaatgttgcggtaaacatgtgtaaaagtttttgtgtggacatacaattttaattatcttgggtctctacaattcatttaacatcttatgtacaccctgccttgacatgctttgctgttttacatctatgttgtgtgattccattagattgtctgcctagcatagtgccttcagagttctctctgtcctagagagtttgcaagactgtcccattattatatttctcctttccctttcctttaccttccacacacttctgtaaataccatcttcatcaccaccaccaccaccacaagacaacaataaaaattatcaacagttatcaaaaggtagcttaataatactaggtagtaattcaaaaggttggagtaaatctatacatattgacaagggaagatgaccaatacatagtgtaaaaagaaaaaggtaacttgcagagcaatacatgtagtaggatctcattaaaaatatatatagagagagatgtgtatatatacataaatatttgtgtataaattccttgaaatggaagggacctaaaggatatacaccaatctatttatagtggtttccttaggaaaagaaggagtggaaggcacaggaaaggaaactttaaattttttctgtatatatttttgtttttgaatcttttacagtggaaatgtatttttatattactttgggtaattcttaaaattaataaaaagaaaaaagtgtaatcacaaatggaaaataactaagttggagaaactaaaaagaaaggacagaaaaggaaaaaaagaaaaaggactctaggaaggaagagggcatagatattgtggcatgtagacaggaaagttaatcagagtcttagtaacagaatactctacaaaagagcattaaataaacacaaaagtagacatttaggttgcacaactctgtgaacatactaaaaaccactaatttttatactttcaataggtgaattgtatggtttataaattttacctcataaagttgtttagaaaagacagatcaaaagttcccagtggccgggtacggtggctcacacctgtaatcccagcactttgggaagacaaggtgggcagatcacttgagatcaggagttcaagaccagcctggccaacatggtgaaaccccgtctctagtaagaatacaaaaattagccaggcatggtggcgcgtgcttgtaatctcagcttctcgggaggctgaggcaggagaatcgcttgaacccaggaggcagaggttgcagtgagccgagatcatgccactgcataaacaaataactttttagtatgtgtgtcccatctgatatttgggacatacttatcttgtatctgaatgttttatttgstaaatctggcaaccctaaacagaaggggttaaggtttgaatcctttagatttaaattgcttttttagcatcaccaaggcattttgtttctaactgacggcttttcatataactcccaaaccctcgtctgctatcccagggaaggttttatgatggagaagcactgaaagtaatgtctagcagttcagtcatacaagcctgattttacctttactgcattgatgagaaatcattggtcccagattccaaatgtggtcagagtacgaaagcacaactcccaatttccatccgcctggatgttcctgtcagcttctgccctacagaaagggagaagccaaaggtctgtaaagggagtagggaatagggcctttggtttttgagcatgtcctaaattgtgccagccaaaccaaccttctatggacccttgttaataaattggacagcttttatgattattttgattttctttaggctcytttgaacaattttagacttgtttttgcttaactcagacagaaaaattaatgaagctttaggggatggtcagacttagaggtgcaggagatcagtagtagctcaggagctggacttttcatgacattccagactttagtgagcttcttctcaaagctcttcttaacactgcattctacacaccctctacagccatgctgaatatcctctggtttgctgacttttgcatagaagtgtcaacaaaccattagccttagctgaggctcctctttgagtccagctgttctgtgattatatagatcttcccataaggaggaggcgattgtcctctactggaggagtttggacagcaatctgaccccaattgagcagaacatgtttytaagcatttttcacttgtgtacttgttcattcaacaaatytttattatatccagagcctaatgctgagccaagcggtaggctacagagatttaaagaaaagaaaaaacatggtctctaccttttttaaataaattgacatgaaattgtacgtatttattgtgtacaatatgatgttttgaaatatmtacataccttctagaatggttatatcaagctaattaacatatgcagtacctcacatagtatctctgcagggaaggcttatggcctgggcaatttttagttctgagcaagatggcctggaccttagcttgctgctgctagtagattactgggagtgtcagatctgtcttgtcatgttaatgagagctgggtgggacttactgccacctgctactcttactccttgtgcgaactcttctgtacagtagaaacagctatgcttctccttggaataatatcccagtggccagagaactgtcccttgagctccacaggggccgctgcttgccgtgcatgtggagagccagagcacagacctggcttatccagcctccacctggctttgcccctccacccgccctggtagcttaacacaaaggacagaaactttggggagctttatgaccctatccattgcctgagaaaccagaataccttccctggagatataaggcaagcacaaatcccaccactactaccacagctggtgttcttttccaagtgccaccttgtggctagaggccaacacagtccattacagcacctccaggtagaataacactgcacccgggaaggaagaaacttgtgcctgacctcagctatcaccattgtctgcaccacactagccgaccaggaggtcctgagtctgttcgtgtgaccaggtcattacttactaccactggcatttgagaaagccaacacactaaggctagctataaccaaggaatctcacagagtctatgtcactcccctgcaaaccccatcagagccagtgctagtacctgcttctgggaaacttgagaacacatcatatcactggatcccttgcagacattccctagtaccagcctggagtgtggcagcccctctaggtggctagatccagaagagcaacagaattcacagtagtctggctctcagggactcctacttctaggggaaaggggagtatactacgtcaagggaataccccatgggacaaaggactctagatggcaggccctgagtcccagatctttctgctggtggaagtttctttcagcaggggcacagttgcagtgctggacttagcagggaaagtctgcagctctactccaacagccgggcaccaagcctgcggcttgtgaagaatctcagagagggggacttcttttccccctcatccaccattgcagacacagctggggcttctcccatgggagcttggtgtgagtgcatctatgcatagcatttctggaacacttcaaggtgactgtatccccataggaggagcactctccaggttcaggcttgcacaagaggtagagtcacaattcttccttacttggaacatcaacattcctgcagatgaaaagaggtacctgtctgatctgaatagctagaacacagtcaggagtgtgtcctgctggcctggcaggggagctgaggtggctcccacccttctgcctgataaaacctcagtgtttctcactgagagctcccccagccacctctgacaaacttgggacctctgcccaccattgggtactgcatttacccacctgcttcagccacaactggtttctacacagggatacctcctctgctggcctgaagcccagactgttcaaccagtaaataaaatactagggaaaaataagtaaacaaaaaggtgtataccacaggggaatgaaataagtaagcttcaagagaactctgctgttccaaccccctgtgagacagtaaacttgcgcacatactgtgcacattgttactacaaactagcatctgagaaggccatcatacaaagactgccagtaaccaaggaacttacgtagaatcttcacccctgaaagcaccaagagccgaattaggctacagtaaacattaaagtcagatccttaagagggtaaaaagaaatttttaaaaaacacaatcaaaataattctataataactagaagaaatggtctacccaaaagagaaggaaccagaaaaataattctggtaacatggcaaaacagggttctgtagcacccccaaaagatcacattagctctccagtgatggatccaaacaaagatgaatttttttttttcttttgtgatggggtctccctctgtcacccaagctagagtgcagtggtgtgatcttggctcactgcaacctccgcctcctgggttcaagcgattctcctgcctcagcctccccaagtagctgggactacaggtgtgtgccaccactcccagctatttttgtgtgtgtatttttagtagagacaaggtttcaccatgttggccaggctggtctcgaactcttgacctcaggtgatccacccgccttggcctcccaaagtgctgggattacaggtgtgagccaccacacccagccaagatgaaatatttgaaataccagataaagaattcgaatggttgattattaagctttgattatttccttgagtacaaggagataccagagaaaggtgaaagccaacacaaagaaattaaaaaaaaaaaattcaggatatgaatgaaaaattttctaaagagatagagatcttgaagaatagctaatcagaacttccataaatgaaagacacatttagggaattacaaaatgcaatggaaagatttaaaaatagactagaacaaccagaagaaagaatttcagagcttgaagacaaggctttcaaattaacccaatcagaaaaaataaaaaagaataaaaataaatgaacaaagtctccaaaaatatggaattaagtaaaatggccaaacctaataataattgatgttcctgaaggagaagaaaaagcaaaaagtttggaaaacttatttgaaggaataaatgaggaaaacttctctgaccttgctagagatttagatatccaaatacaagaagcgtaaagaaatcctgggagattccttgcaaaaaggacattaccaagcatatagtcatcaggctatctaaagtcgatgtgaaggaaagaattctaagagcagtgagacaaaaccatcagttaacctgtaaaggaaaacccatcagactaacagaagacttctcagcagaaaccttacaagccagaagggattggggtcctatctttagcctccttaaacagagtaactgtcagccaagaattttgtatctagcaaaattaagtttcataaatgaaggagaaataaagtcattttcagacaaatgatgagggaatttgtcactaccataccagccctacaagaaattctaaaaagagttctaaatcttgaaacaaaagcttgataggcagcaaaataggacctctggaaagcataaaactaacaaaacctatgaaacaataacacaatgaaaaatacaaagtatctagataacaacatgatgaatggaacagtacctcacctctcaatattaatgtcacatataaattgcttaaatgctccacttaaatgatacagattggcagaatggattaaaaaaatcacaaaccaaatatctgctgtctgcaagagattcacctaacatgtaaggatttatataaactcaaggtaaaggggtagaaaaagatactccatgtaaatggaaaccaaaagcaagcaggagtggctattcttatctaaaataaaatagaccttaaagcaacaacagtgaaaaaaagacaaggtaattatacaatgatataaggctcaatccaacgagaaggtattacaatcctaaatttatatgcacctaacgctggagctcccaggttcgtaaaacagttaccgctagacctactaaatgagatggatagcaacataataatagtggggaacttcagtattccactgacagtgctagagagatcatcaagacaaagtcaacaacaacaaaaaaaattgactttaaatgacactctcaaacaaatggacctaacagatatttacagaacgttctatccaagatatgcacaatatacattcttctcatcaatacatttaacattctccaagatagaccatatgataggccacaaaacaagtcttaataaatttataaacatcaaaattatatcaagtattttctcagaccacagtggaataaaagtagaaattaactgcaaaagaaaccctcaaaactatacaaatacatggaaattaaacaatctgctcctgaattatttttgagttaacaatgaaatcaagatggaaatttaaaaattcttttaaatgaatgacagtagtgacacagattattaaaacctcttgagatacagcaaaaaaaaaagtgctaatgggaacgtttatagtgctaaatgcctgcatcaaaaagtcggaaagatcacaagttgacaatctaatatcacacctcaaggaactagagaaacaagaacaaactaaacccaaagctagcataagaaaagaaataataaaaatcagagcagaactaaatgaaattgaaacaaaaaaatgcaagagataaatgaaaaaaagctggttctctgaaaagataaaattgatagactattagctagattaaccaagaaaaaagaaaattcaaataaattcaattagaaataaaactggagatattacagttgacaccacagaaacataaaagatcattcgagactactaacaacacctctatgcacacaaactagaaaatctagaggaaatggataaattcctggaaacatacaactctcctagattaagtygggaagaaataggtcccctgaacagactaataacaagcagtgagattgaatgagtaatttttaaaaattgctagcaataaaaaagcccagggccagatggattctaatgtgaattctaccaggcattaagagaagaattggtaccatttctactgaaatatttcaaaagattgagaaagaagtaatcctccctaaaacattctatgaagccagtatcaccctgataccaaaaccaggaaagaacattaaaaaaaaagaaaactacagaccaatatccctgataaacatagatgcaaaaatcatcaacaaaatactagctaaccaaatcgaacagcacatcagaaagatcaagtgggttgatcaaacctactataatcaagtgggtttcatcccagggatgcagggatggtctaacatctatggaagtcaataatcatgacacatcacataaacagaattaaaaacatatgattggctgggcatggtggctcacgcctgtaatataacactttgggaggccaaggtgggtggatcatgaggtcaggagttcaaggccagcctggccaacatagtgaaatcccatctctactaaaaatacaaaaattagccgggcatggtggcatgcacctgtagtcccagctactcaggaggctgaggcaggagaatcgcttgaacccgggaggcggaggttgtggtgagccacgattgtgccactgcactccagactggcaacagagcaagactccgtctcaaaaaaaaaaaaaaaaagtatgatcatctcaatagatgcagaaaaagcatttgataaaatccagcatctctttgtgataaagactctcaataaactaggtacagaaggggacatgcctcaaaataataaaagccacatataacaaacccatagtcaacatcatactgaaagggaaaagttgaaagtattccccctgagaactggaacaagacaaggatgcccactttcaccatttctattcaacatagtccattaggaagtcctagccagagcaatcaggcaagagaaagaaataacaggcatctcagttggaaagaggacatcaaactatctccattcactggtgatgtggtcatatacctagaagaccctgaagactcctccagaagactcctagatttaataaacgaattttgaaaagtctcaagttacaaaatcggtgtacacaaatcagtagcactactatacaccaacaaccaccaagctaagaatcgcatcaagaacactcaatcccttttaaaacagctgcaaaaaatataaaatacctaggaatatatttaactaaggaggtgaaagatctctacaaggagaactataaaacaatgctgaaagaaatcatagatgatacaaacaaatggaaacatatcccatgctcatggattaagaagaatcaatactgtgaaaatgaccacagtgcccaaagcaatctacagattcaatgcaagtcctatcaaaatgccagcataatttttcacaaaattaggaaaaacaattctataatttatatggaaccaaaaaagaccctgaatagccaaagcaatcataagtaaaaagaacaaacctggaagcatcacattaccagacttcaaattatactacaaggctatagttacgaaaacagcatagtactagtataaaagtaggaacgtagaccaatggaatggaatagagaacagagaaataaagccaaatacttacaaccaacggatctttgacaaagcatacaaaaacatgaactgtggaaatgacaccctatttaataaatggtgctgggaaaactggttagccacatgtagaagaatgaaactagatcccaatctctcactgtatacaaaagtcaactcaagatggatcaagacttaaatccagcacctaaaaccataaaaattctagaagataaccttggaaaaactctcttgaacataggccttggcaaagaattcatgactaaaaccccagaagtaaatgcaacaaaacaaataaatgggacctaattaaactaaaaagcttctgcacagcaaaagaaataatcatcagagtaaacagataacctacagaatggggggaaatatttgtaaaccctgcatccatcaaaggactaatatccagaatctaaaagaaactcaaacaaatcagcaagaaaaaaactaataatcccatcaaraagtgagcaaatgacatgaatagacatttctcaaaagaagatatacaaatgtccaacaaacatgaaaaaaatgctcagcattactaatcatcagggaaatgcaaattaaaactgcaatgatataccaccctgctcctacaagaatagccaaaaaagatattggtatggatatggtgaaaagagaaggatgtggttgtaagtatttggcttatacactgctggtgggaatgtaaattagtacaatctctatggaaaacagtatggagattccttaaagaactaaaaatagatcttccatttgattcagcagtcctactgctgggtatctactcaaaagaaaagaagtaattatgtgaaaaagacacatgcacacatttattgaagcacagttcacagtcgcaaagacacagaaccaacctaaatgcgcatcaaccaatgggtggataaagaaaatttcatatatatatacaccatggaatactactcagccataagaaggaatgaaataatgtcttttgcagcaacrtgggtggagctggaggacattattctaagtgaagtaactcaggaatggaagactagctactgttatgttctcacttataagtgagagctaagctatgagtacacaaaggcatacaaagtggtaaaatggactttggagactcagaagggggagggtgcaaatggagtgaggaataaaaaactacatattgggtwcggtgtacattgcttgggtgatgggtgcaccaaaatctcagaattcacaactatataatgcatccatgtaaccaaaatcacttgtacctcaaaagctactgaaatattttaatggtttttttaattaacatgaagttatatatatttattgcatacaacatgttttgaaatgcacacacacacacaaaaccccttccagaatggttaaattaagctaattaacatatacattacctcacatagttgtcatttttatggtgagagcacttaaaatctactctttgaatttttcaagaatacaatgtattgttatttattatagtcaccatgttgtacaatagatccctggaacttattcttcctatctaactgaaatttgtaacctttgatcaacatttccccaactcctccctcatcagcctcccagcccctggtaaccaccatactatccagccatgaaaaaagaggtaaatccgtcattttgtaacaacatggatgaatctggagaacattatgttaagtgaataaatcagacacagaaagacaaatactgcatgatctgactcatatgtggcatctaaaaaagctgatctcatggtctctacctataaggagctctttgtttagtgggagaatgctggtattgtaagtaagcatgataagtaagttaaatataaaccatgggatgtagctgtgggtagactgaaccagaaacacatgatgaaatggtggcgagaaagcaaattagttrctgccctttctgcagggccatggatactggccttttctgtgatgactctctgctacatcatttagctgttcttcttagcatacatttttttttaagagatggtgtcttgcttgttgcccaggctggtgttgaactcctgggctcaagcaatcctcccccttaagcctcccaaaatgctgggattacaggtgtaagccaccatgcctagtcattttaccattccttacatggaaatatctagtggttatgctccagatatctcagaaatgaagtctggagagatgaaaaataaattttcttgtgtattcaagactttaagccatatggttagctaaaatctactgatagctgtaatgttttagattgttatttgactaccataggataaattgtgatcatttggaatctgtgtgagaaattccagtattcttaatgcgaactgactctgtattagttcgttctcatgctgctataaggaaatacccaagactgggtaatttgtaaagaaaagaggtttaattgacacacagtttccacatgactggggaggcctcaggaaacttacaatcatggcagaagtcacctcttggcagggcagcaggagagagaatgagtgcaaacaggggaaatgccagagacttataaaatcagatctcatgagactcattcactatcatgagaacagcatgggggaaaccacccctgtgayccaattacctccacgtggtcccacccttgacacgtgaggattatgggattacaatttaagatgagattttgggtggggtcacagccaaaccataactgtctccaactaatctgacttgaaattagccctttatccttccccttgcagctgtcttcacttatttttagagacaggaaaaggagatttctatgacagccattaaatgacttggctgaaatcacctaggcctgctaatctggaactacagcaaggggtcattgctaaatttgccctgccagcacctgggcttaatggaactgtgagtatagtagtatatggagagtaagccttgactaatctagtagttaagagacttgcactccggaagatcatctcattgttcttgcattagctggaaaatcccatttgtgatcaattcaccattgtgagcaaggaaatatttgttcagaatctcctaagcctgattgccacctgactaactggccttcattccttttctgccctcctccttcttttcctggttacttaaatttcagcgtgctactttcttttgtttcatcttacagagctcattttccattttagtttstgccatttccttgctaggataatcgccaatcttctgtagctttaacccctaaaacccgaggtggtattacatatgttgcrtaagagctaagtctttcaccctggcatttgagtcaaaactctaagcattatatccttaaacagaggcttcttctattttgagacttctactacctttttaccaggtagacagaattctcctcactagactatggcttttgtacccttccttttccactacctggattagcctagtgcatccacagaaggtagctgaaagttcaaaatctattttgggcacagacaactatatcaatgatgcatatggaatctccttgacatattataagataaataacagaatataacatttaatgtgtactctttttttggttgttgttagaggcagggtctccctctgtcactcaggctgaagtgcagtggcatgatcaagctcactgcagcctccaactactgggctcaagcrattcttccaccttagcctcccatgtagctaggactacaggtgtgtggcaccatgccagctacattaaaaaaattttttttgtagagacagggtctcactaccttgaccaggctggtcttgaactcctggcctcaagtgagcctcccaccttggcctctcaatgtgttgggattacaggcatgagctattgcacccagcctaatgtgtacttttgtgtggttctcattttttatttgtttttcattcaccttttctcaggttgaaaatgtgtacttttgatttgtcaggaatcagataggcactttacatttatcatctcatttagccctattagtatatacagtaggttttactaccccattttacacatgaagaaactaaagccaagaaatgaaaagtgacttgccctaggtcacttaacaatttagttgcagagtccagtctagaatagctaaaatgtcctgagcatttttawttattaggaattgttttcaaatattttgtgtgccttaactcattaatcctcccaataaccttatgagtagatattattatcatttccatcttacagaaaaataaaatgaatctcaggttaagttactttcccaaggctaagaaatctggctttctagcccccaattcctcttctcctcctggtgaaaatcctattttcctttttccttctttctttgtggcaggtctgtcatcaaagaaccaaaacaaggtgaaggttaatcctgccctgactttggagtctcaatctgtctttgccaactcaggctctgaagtggaagactaagatttgaaccctgacagcctgactcaattgtctgtgttcttaaccactatgggagctttctatattttttaactttaagtctactgcacattttataacaccagcttgcctcacttcaccaagatgtctggcccttttagttcagttatttcaccatgcgcaggccagcttttaggacaggtcctttgaaaccagtctttgaataggctgtagattcaaccctcagttcctaatggagaatgaattttccacagtcaccagtggctagaagtaggtgtttgtccccttgagttccatagctaggacttcttcaactagactatttcctagactctccttgtctcaactaatttccaaccttctgtcattctaacctctcacccataattcacattttgtcattctcgtttcagccaaacaggaataacctttgaattaacaagtaatggggaaaacacttagtcacccagtcttctcttacagtatttacatgccccagggaatcttgaattaatctttattatccagtctgaaaactttcttcctgcctttatgatctcaaacaagactggttactttctttccttacagcctgccttttttctctctcaaacatttagtttattctcttagatggttgtgcaaagtgatgttttaaccacttttctcatcattccttcttttccttcatcgtagacctcttaggaaatctggctttctagcccccaattcctcttctcctggtgaaaatcctactttcctttctccttcttctttcttcatggcaggtctgtcattaaagagccagaacaaggtgaaggttaatcctgcccctacttcggagtctcaatctgtctttagcaactcaggctctgaaccttgagatctactgctttactttactcttcaactcaaagagggagatatgtgttcagtattcagttgttgcatagaggctgaaccccaggtatccctcagaactagtgagagaatggcctgtttcacccagataagttgctggcagaggctgttagacccttgttaggttaaaaaataatcagggatatttaggattaaatttaataagaaatgtgaaatccagtaagaaaatattataactttatcaaaagttataaaataatatttttaaacaaatagaaacgttttactggtctgaagggataaatggcatgggagaaactgattttattcagtaatccattaatatattgagtatgaacatagcctgtccaaggactggagaatctcaacactagtagaaacaccagtacttctctggtaccctgccttaatcaggtagctatctgtgccccttgagaaagtccctgcacaaagggcctatgccatacaccagctctaaatcctagatgtgactaaattatctgagctatgcatattccactgcttcagagaagctaagcttcaatgattagcagaagcccttgtatcacacagttgtaaataagccactaaccagtcaaaataaagctccacaaaatatatcaatcccatctcacataagtataaaacttctcccatgtttattcaactagtaatcatccagtaaccattcatcctaataatcacaagaataaaatataagaaggaagaaatgtactagtacagtagaacaaactacaagctgcatagctgggttgtaagcatagtccagagaagactcatagccatttgcttatgtattgctggtaagctgactatatagacatgatcatcatgcacaaaggagtggcgtcccaggaggacaccaacagctatctctctgtctctctcacaggaatatagcatgttaccagatagggggctaatattgcaaaaatgtcaactctatccaaattagtgtacataatctaaatctgtttactctcaaatccttgggtaaacctagctgaacatcccagtttcatcttggtcacaatttgtacaaatggtaaccacaaagaaaaagcctctagtagatacagaaaagagaaagataggaatcaaagcacaccactacaaaagtcatcagatcacaaaggaagacagcaagagaggaacaaaggaactacaaaacactcagaaaacaacaaaatggcaatagtaaatacctatcttaaattactttaaatgtaaatagattgaattctcccatcaaaagactgactagaatggttgaatgaaaaaacaaaacaaaacaaaaaaataagatctaacaatatgctacccacaagagagtcactttaactttaaggacatacataggctgaaagtgaagggatgtaaaaagatactccatgcaaatggtaaccaaaagagggcaagggtggctatgcttatgtcagaaaaatctgtcataaaagacagaaaggtcattatttaatgataaaggggccaattcataaataggatataacactagtgaatataaatgcatccaacaacagagcacttaaatgtataaggccaaaggaagacagcaagagaggatcaaacgaactacaaaacactcagaaaacaattaacaaaatggcaatgctaaatacttacctatctataattactttaagtgtataaggcaaagataaacagaactgaagggagaaatagacagcagtacagtaaagtagagaacctcaataatccactttcaacagtagaatcattcagaaagagaatcaaggaaacagtggacttgawtaacactatgaacaaatggacctaacagatatatacagaacattccattcccaaacagcagaatatattgttcttttcaagtgcacatggatctgttctccagtataaatcatattttgggccacaaaacacgtcttaacaaatgtaaaaagattgaaagtatattaagtatctttcctaactacatggtatgaaactagaataacaaccaatggatgaaaaaaaaatccaaaaggtgaaataaaaatacctttatacaagtggaaacataacaaaacttatgggatgcagcaaaagttgttctaagagaaaagtttattgcaataaatgcctacattaaggaaaaaaaaagaaagatctcaattaaacaacctacttttataccttaaggaactaggaaaagaacaaattaagcccaaagttagcagaaggaaggagttagagtaaaaataaataaaatggagaatagaaaaacaagaaaaaataatgaaactaagaattggtttattgaaaagataaacacaattgacaaacccttaggtaaacttttatttttaaaagactctaaaatccaaaatgaaagagaaaatgtacaactgatgccacaaaaataaaagggatcacaagagactattataaagttatatgccaacaaattgaataacctagaagaaatggataaattcctggagacatgcaacctaccaagcctgattaacaaagaaaaaatctgaacagactaataagtaaggagatcgaattagtaatcaaaaacctcccagcaggccgggtgcggtggcccatgcctgtaatcccagcactttgggaggtcgaggcaggcagatcacttgaggtcagcaatttgagaccagcctggccaacatggcaaaaccccatctctactaaaatacaaaaattagccgggcgtggtaacaggcgcctgtaatcccagcttcttgggaggctgaggcaggagaatttattgaaccagggagcttgcagtgagctgagatcatgccactgcactgcagcctgggtgacagagtgagactctgtctcaaaacaaaaactaaaacaaaaccaaccaacaaagaaaagcccaggaccagatggcttcacaggttaattctatcaaacatttaaaaaataattaacactagtccttcttaaactcttcctaaaattgaaaaagagagaacactttcaactcattttatcatgccagcattactctgataccaaagccagacaaagacactacaagaaaagaaaattattggccaatacttctgatagatgcaaaaatcctcaacaaaatcctagcaaataaattcagtatcacagtaaaagaatcatatgtcatgaccaagtaggtcttatctctaggatgcagagatcacttaacatatgcaaattaatcaatgtgatataccacattaacagagtgaagggtaaaaactgcattaactcagtagatacagaaaatgcatatggtcagttgatttttaacaaggacgttaaaactattcattgggaaacgaatagtcttcaataaatggtgctggtagaactggatatacacaatacaaaaatataaaaataaaaacggacccctatttcaccatatgcaagaattaatgcaaaatagatcaaagacttaaatgtaagagctaaaactataaaactctttttaattttatttatttatttatttttggagacagagtcttgctctgctgccccgactggagtgtggtggtgcaatcatggctcattggccagcctcaatcctggcctcaaatgatcatcccacctcagcctcctgaatagctaggatcacaggctgcaccatcatgcctaattttagtttttatagagatggggtctcactatgttgcccagattggtcttgaactcctgggctcaagcaatcctcctgcctcaacctcccaaagtgctgggattacaggtgtgagccactgcgtctgggctataaaagtcttagaaaaagaaataggagtaaattctaatgaccttggattagcaatggtttctaaaccatgacacgaaaaacacaagtgaccaaagaaaatgcatataggacttcatcaaaataaaaaactttgttgcttcaaagccaaccatcaagaaaatgaaaagacaactcagaatggtacaaaatatttgcaagtcatatatttgataagggccttctatccagaatatataaagaactcttacagttcagtgataaagagacaacgcaatttaaaaatggtcaaagacattaacaggggaacagtagacactgtggactactagagggggaggggttgtgggtgcaatatacctatgccacaaaactgcacatgcacccctgtctgtaaaacagaagttgaaatttttttaaaatggtcaaataatctgagtagacatttcttcaaaaaaaaaatgcaaataactagtaagcacatgaaaagatactcaacatcatcattagtcattagggaaatgctaatcgaaaccacagtgagatactatttcacagcctttaaaattgctaaagtaaaaagcatgagcaataacaagtgctggagacaatgtggagaaattgggacactcatacattgtgaggagggaatgtagaatagtacagatactgtggaaaactgtttagcagttgctcaaaaaattaaacataaagttaccatttgacctattgattctactcctaggtgtatactcaagaggaatgaaaacatgtttacacaaaaacttgtacagggatgttcatagccatattcttcacagtagccaaaaggtggaaacaaaccaaatgcccaatcatggatgaatagataagtaaaatgtggtacatccaaacattgacatattgttcagatgtaaaaaggaatgaaatactgatacgtactacaacgtgaatgaaccttggaaacattattctaagtgaaagaaaccagttttaaaagaccacatattttatgcttctgtttatgtaaaatgtccagaatagacaaatccacagagaatagattagtgtccaccagggactgagaggagaggtcagaattgagagtacaggtatgaggtgtctttggggggtgatgaatatgttctggaattaatgacgatggttgcataaccatgaatatactaaaagccattcaattgtacacttccagggggtgaattttatattatatgaatcatagctcaaaaaaaaaaaaaaaacttgaacaattgcagagttgggtttctaggacctggagccagagactcctcttggaggagtgaatcaagtagttcaagatcagagtaggagtcggtagcctaggatagaatttttgagggccaaggaaagaagtttctttttaatcttgggagccatgggccaaggaggaccttagagggccagaagagctttaaagtagatattcaatacaactcagaggcagaggggttgctacgacccactctctgagggggcaaattctatggagacattacctaagaattactagaagcattaagggcagaaagcttaggagcactgtcagccttcaggctaaattctatattgcttggtataatacacaggcttaagagaactgggaagcacttaatccatatcatccaaataactaaggcatctcctccaggaatacatctatgtcctactttccttgacttccatcccctcttctgtgcacctccaacctgtagctctgcccttacattagattgaaattttattttatatttgtctgtcctactaggaatagtaccaagatggtcaggatgatgttttcctcatctcgtaaccctaggacctagcacagggcctgaacctgccaagaacccagcaaatgcttgctgaaccaaggaagaaccaaagagactataggaatgtttcattcaggggagaaagatctattgattatatatatatataatttgtttgttcataacatggtaacaggctcactatttgtagtagtttgtaacaaacacctctgttttgatgtgatgattttgtcaagtagttatcaggcttactcctactatactaaagtccttgaagtcagagactgtcttactcatcgttttatccctccacggcatccagtacactggcctctgtgcaatagatgctcagtcattgtttattaatttaaatttagttaagcaagtttaggacaagttggcttagaaaagagtctcagatatattaagacaaagtgctaaaattgacttatgagggaaggctgggtttctgtgtttgtcagtaaaattggtgcagaccatcttgttgtctgtggagacatgatctaggaagtactagaagcattgatggtggagaactcctcaggagttacttgtcctgttgcctccagaaagcttgaatacttgagcatttttatttttattatatttcttgattcttttgattaaagagacaaaatcccatgcttaaatagacatcttcagcaagaaagtgtggggatctagtgaagtcttcactagcagccaacatcccagtctgatatacacaggggcatccatctcatcgtttatcctatcttttttcagaacatgagagatatctgcaagccaacaacaaagaattcaacagtatttttggatatccggtgagtgtcatccctctggctgtttcagaagggggtcagtattctcctataatattcttctttgttgggggagcgtgaaattctttgtagttgtggatcctataacacagattctattacactttctttcaagctcctatacaatgcaatgaaggctcagaagccaaaattaatctagtgacataagctagggagagaatgtcttagatttcaggtttatatataactcccagaaaataaatactgtagtttttcttgcacaaatgaaagcatagttctacttttttcacttagacatgtatctgacaacacatacagatatccctcatttatttaatagcgacattgttttccattatattgataaacctgaatttatttagtcagtcttctattgatgaacatttaaatgtctccagtgttttgctatgctaaatggtgctgaatgaacaccactatacatatattttggcacatttgtgtgactgtatcttatgaaagtttcctaaaagtaaattgtctgtttcaaaagaaaaacacactaaaaattaaaaattatcagaggccagattgccccccaaaagaattatatccatttatgtttctacttagagactgcccgtttctccacattcctgtcaaactcattattatcaatctttgtcatctttgccagctcttagatgaaaatgacatacatgttaattagccttttgtatttctttttctggaaaatacctattaatgatctttgcccacttcctattgaattgttcatttttcacttatttatgtgtctataactaagtaattcatgaaaagatatatattgaaaaggcatgctccaatactccatccttgtccatatctgctcccctgagggaaccactgttagttttcttgtgtgtattaatcagattagtgtttctttgtgcaaataaagcaaatacaaatatatagtcttattttcctatttttacactattctgaaccttaacagtatatcctggagatgttttcatcatcataatttcataatagtttttttcttttttttcctttttcagctataatatatagtatttcctctgcagatttaacatattttatttaaccagttccttttaaatggacatttgggttgttttcaatcttctatgatcacaagcaatggttttatacataatataattccatgcatgtgtagcataatataattccatgcatgtgtagctatgtatacatatacatagctataattatataaaaatatatgtctgcggtctctgtgggatattagtttatgatttctgagtgagagtggtatattagtccaatctcacactgctataaataactacctgagactgggtaatttatgaagaaaagaggtttaattgactcacagttcctcaggcataactggaagcatgactgggacgccgcaggaaacttacaatcctggcagaaggcaaaggggaagcaagcacctttttcacgtggtggcaggaaagagagagagagtgaggaggatcctatacttttaaatcatcagatcttgtgagaacacaagaatagcatgagggaaagccgcctccatgattcagtcacctccyaccaggtccctccccaacactgggagttacaattcaacatggtatttgggtgggggacacagagccaaaccatatcaaatagttctggataataatagtatccaagatatgaccatgaaagcaggtttttctcttctctatcttctagacctacgtaacaagcagtggggacagtaaatctaggtttgggcatcagacagatctgagtttgaatatagctcagcctttactaaccttaatgtcttaggcaagtttgttaacttctctgatcttcagttctttcatctgtaaaatgggcataataatgttcaccttgcatggtggtcgtaggagttaagtatggttctgaaaatgttagttctgtttctccaaaaaactattagcccttggaaaaagggyatctcatttatctctgtatacacagtatatttgtgatacagtttctatcacaatgttgtgcacacagccaacattcaataaatatatattgaatattgaatgagtgaatgaacagatctgactgattctgatatatttaacaccatttcatttccctggccctgagcattgctcattttcctatttctctaacttcttccactgtgactccttgtcatcttcctaactcctaactactgattctcattatatccttggccttttattctcttctattttcccaattaaccttcagtcccatatcactgcccaaagaaaaaaataaccaaaccaaaattaaccacctcttatcatgtttaaattttatcacctctgccaaaaggactaaactctgaggaacttcatagttaaggagatgttattaggatattgcttctggttttacatttaagagcaaaatgaaacgctctagttgccaagttaataaataaatacctgtacttctatcttgaggcagaatgctacctacgtgagtagaaacctgaaatatattaaatggctataaaatcaaatggaaaatcaacagtgaaggctagctacatcagtaaggccacctctcagaagatctttgggtccaagtatcacagccatctggacttaaacactgagaaattcaaagtatcttatgatcaaagaaagctatttccatgttagaattacatactctcatgatgagaagggcctgtagagatcattttactagaacttcgttcaagacagaccatgagcttctccagaagggatcctgtctaattatttttcagcctccactagtatagtccagcataaggctgtgaaaagagcaagccttgagaaatgctatastgtctgattgattattatttggaaaatcatggagagaacaccaaggaaatcttagttttggcttggatctctaaactcctaagtgctaagctatttgaccagcttctcatccctaaggaaataggtaggttcttcttttaaaaaaaacaaaacaaacaaacttgtatttaagttcaggggcacatgtgcaggatgtgcaggtttgttacataggtaagcctgtgtcatggggattttttgtacagattatttaatcacccaggtattaagcctagtatccattagttatttttattcttttgttctgtccttttaaatggaagaggtaggagatgagccctgaacttagggaattatttggtcttattctcctgcttttagagctcttagatttgagctctgacatcttaggacaaatgatttaagactccaaggtagaaagtaagatggtcctgtgaacatcttgagatcagaattgaggaagtagacaagttcccattttcactgagcaaaatagtagcttagatataagccaaaactctttaaatcctcttaggacaattaagggccaaatgattctccaatgctgatagtgacccctatagaaaccttcagtgggctaggattgaaagacagttttttgcttttagcatctgacgtccttcaacattgcaaaaaacacagaaaggcacaccaaactgagtttgctcagctaagaaaagctttgttagagagctctggatgcagtacctcaatttcctcatcctcaaaagtacccccttcataggattgttgtgaggagtaaatgagttgctacatataaaatgctagaacagtgcctttcacgaagtaagtactcaataaatgtaagtttttattgctgttgatttgattatcattattactatcaataacatcaataagcaagaactctatcagggcagagatacattcccccaagtacccaacagtcttgccatctttctaccttctaggcctctctaggggtagactgggaagtaggcgcagctgcttatcaacccagttttgagctgtcttttgtctaattgtgtatttcttgtttatttgtttgtttactcacagaacaatgccatcaagacctcaaaatatagtgtctttaatttcctgcccctgaacctatttgaacagttccagagacttgcaaatgcatatttcctcattttgctatttttacaggtattgcttttgggggcctttttcacagagtattttataaacctctctggggtcaggctgtgtaatcagtttttctcctccctaaattgggaaatgtcttctctctttagacaacaggaacgtggatggctggagtctcagaccagtcccttagaatagctgtggtcaggattagctagtgtatagcaagcctctacacaaggaaagggacaaggtcaccacatcccaaggaaggggagctcctcatcatggctgtattgccacagttcagtttgaccatagggggctacagaattcttcaccccaaccacaactccaactctattcctccttcttgtcccagcctccttgacataaaattaacatatgggagtgctaaagaaggtttagaatggtttagaatatgagtgccagcataagaacaggaagcagggcagggtaggcccaaattgggagacagggacaggtcatctcactcctccttgtactgaagggtgtgggagagcatgtagtttttctgtatctacttttacccactctccatacccattacttttcactgtcaaaggagaaatgggtctttgccatcaacacaaaggtagtggggttcaggatagataggtagcaacttatagccttttattcttttatcctcccttgggaaatgtttacttatatttggggggttatatgaaagatacaacagtggaaagcaactaggatagttggatttagtatgaacaaatggaggtgaaaatgatgttgagggtgagggatgtggtgggggggaatgtattatcctttcagttttctgacccaagatcctctccctttccctctcttagttgattccccagatctcctccttgacatggtatacaactataacacccctgatggtggtgctgtccattaacagctgtgaaagatgccatcgatgacctggtgaagtagcttcctgggcctctacttcctcactgcacctagtcagactgtgggcatgaaggacttcccagaactacctagtgctaacaagaaaccctgaatggaaagagatatttcctttcttctttccttattcatcccagagtaatatgcagtacctttaggcccaagattggtggtctgtgtatggccagaaaggggcaaaacaaggcctttctctatcttcctactgccaccacttttagcccctctcctgagcctccttccatctttaataacccactctttctttactcctctcttagctttttctagctttgttctcatcctttttcctctgctcctccttctcctactctatattccctttgccttcytctatctgcccctgctccatctctcctattctttctctttcttctctccacatttcctgtctcctctcgaactctattttcctttccaactttcaattctgttaagtgtgcacagctaggaaccctctgtcctggctttgaaagagaaactggctcacagtgagtgctgcatggcttcctctttgcctcttacagcaggcccagcatagaggggtgagagtaaggacccagtaccatgcctactagtaggatttggaaagccagtcctatagacctgcttgcagtttccctaagagggtctttctgattttgccagaatagatttttagcctagtttgagagcaccttgtttcctcagcactttatctctataaacccaggattagcatgttgtggtttacctttcagtcacaacttagatgtacgaaaatataactttatttctctataactgaactcagtttagcttataaccacatgcataccccatcttaactctctccagtgagaaccaaaaattaatttaccaattcatggtaacccaattacttctggcttagaattcagtctctttatgataaatatttggacaattttgaattctgacaaattcaggattctctctgccccactcccagtcctaccctttactcagggagtaatctcaactggaaggaagatatttatgtgaatcctggcatcaggacatagcctctatttgtttcccttctatttgatctttaaatattggcctctttcctcagccactatagaagcttctgtatgtcaaccatggttggaggtagggtaggagtctgcttgagaatactcagctttcccagcacctacccaggcagacagaattctgtagccctgcccatcatttggattgtgtcctctgcagcttttgatatgttattctcattcctccaggttttttgcttttgatatttaaaactaaaattttgtctctttcttctccctggattcttttcctgccctctcttcccagcttcccagagataatcaacctcttggcctagtttgaaggaaagaagggcttgggacaggggaaaaggagaattacaaagaagggaactacattgtgtaatatttcaaaatgttaatcttctatatgcagtttgttataggtctatttcctgaacattttcttgtgtgattttagaaaagrcatcaaagtgacgatcgagtcaacaaccagcctgttctgctactggtgaatggcaagtaagttcttctagagaagctggtttaggtaggaccagtcctgaaaaagggttgggtttagctcaggacaatgaaaagaacctcagacatagaaataatttgtttctagatctagcatgccctgaatttgtcatgtcacctcagatatctatgtgggcctcatttttcttttttataagatagaaataatattctctaccttagaggatgcwtgtgaaaatagaaaggaaataatatatattaaagcaattaatattttataacatgatattactatgcaagtgatattattagtgtggtagttagcatggaaacatctgtctttagaacattaatggattctgacatggtttttgtccattctactatagcctttggtcaggtcatcttttctgttaaaaatctaaacagagtattgatgttggccccactgctgtagtgtttggtcatagctatctaaagtgttgcaggaatggaagaaggcaggcatattcctatgtaaggcaaaatatgaagactatcctaagaggtacaaaaaattactatgggaattaataaaaatatgcaattataactggttaaaggaatcaaggaagactttctggaagaggtgtagtgtttgtactaggccttaagggaaggggaagaattcaacaagtagagattgtgttaaaggaaaagtgaccagtgtgggcagaagcatgattgcaagaaagtgcaaacctgaaggagttcaggattgaggtccagcctttatcatggtggccttactgaacacccaatagctatagtatttatcatataattctatcatctcaagagcttgggcagctaatcctgttgtgtattttgtctgctgattcttacacacgatggattgtttcctcaagagttttgacctgttgaaatgtcccataagataccgccaaaaaagtcagttgtagttaaaaagaaaagtagaggccgggcgcggtggctcacgcctgtaatcccagcactttgggaggccgaggcgggcagatcacaaggtcaggagatcgagaccatcccggctaaaacggtgaaaccccatctctactaaaaatacaaaaaattagccgggcgtagtggcgggcgcctgtagtcccagctacttaggaggctgaggcaggagaatggcgtgaacccgggaggcggagcttgcagtgagccgagatcccgccactgcactccagcctgggygacagagagagactccgtctcaaaaaaaaaaaaaaaaaaaaaaaaaggaaagtagagaaatagaaataaaaagaaaagacaaaactgagtatattaggaattgctgaccaaaaggatttagtcaaatgaactcacccaagtagcttgagcacttgggttttataagattattgaagaatttgtcacagagggattttaaggtgggagttaacaggcaaggccctggttagactttgtaagctaccgagtatctgattagattaatatgcagaggtgaggttggttgttgaaacagtctgtgttccagaaaacagctttctttttgtagaacacatgggtataaacagagctgctattttaaaagtttgtctattttataagctgtaatttttgtcatttttcatttctcaataattttgtttacaaacacatcattagtagaactttaagggaattctaagtggctggaggagaggttgtgtccctctataagggtttgtgtttgtttctgtgagttgactcaagggtattacctgctgatacctaatttgaaagaagtataaatttgagccccatccaatatgaggttacagattttcagggaagagtcctccattcactgacccccacaaccctccagactaagatagacaaactttcttgccagtgagccgattttttttagaccactctttcactaatggtgttgcccctcaagggtcctgactttatgagaaattcttagtttcaactcactgactctcaaaatcataaggctttatctcttgtccctctggtgggagaaattgaaattcaaattattagattattaagactggcaatccctccccaacccaaggcaagaacagcttcagaacatgcttactgttttggactacaggattgagtattttaaatcagtaaggaatgtcttcacctctcccaaatctgggacacatgattgttataatgtccaggaacaaattggtaatagtttggcagctccttatgtaagaaattattaatttttatatctccaggagaagctagaatgtgacagcacttgttcttctttatgttttactggtgacaaccgtggaagatagaatgccagagtaacagtgaatgtcaagtcaaggcaaaataaaacaaagacccagatgtctgtctccaaggcttatagctactattctacagtactatcagaaaattctttaaaagaaacagtggatttatataaaaggacttttttggaaaatttggccctcctcaaagcagctgtcttcttaggaaaggtgttctaggaatacccatgcctrtgtgtagctggcaaagtggtgatgtatgtcatgccctgcagatagcaatcctgcattcagagacaaaacagacagtggactgtagactttttcccgctctttgggtgcttggcataatataactgttgcaaggatatagctcatgtttccaaaatgcttgtggcaatatgtacattcttcttagtcctttctcagagaggaaggatttatggaccctgtgtatttggggaaattgaggttaaaaaaaaaaaaaaaagaggagggcagagaaccaccattattgtagaatctgctcatattgccaggctgccttttatggaaagtagggatttgaggatcaaagataatctaattttaacctaagtagataaaggccaggcgcagtggctcacacctgtaatcctagcactttgggaggctgaggcaggcggatcacgaggtcaggagttcgagaccagcctggctaacatggtgaaacctcatctctactaaaaatacaaaaattagctgggtgtggtggtgcaagcctgtagtcccagctattcgggaggctgaggcagaagaatcacttgaacccaggaggcagaggttgtagtgagctgagatcatgccactgtactccagcctgggagacagagcgagactgtgtctcaaaaaaaacaaaacgtaagtagataaaattgatgtgaccttatgacagaacacatttaagctatcaaaaagaatgagctacatcttctataagtgctctccaagatggattgttaaatgaaaaatgcaaagtgcagaaaattatgtatctagtacgtggcttttaaatgtgatttagatgtgtattatatgtgattacatggattggtattttctagaaataaatacaaaaatattattaacagcagctatctttggggagcaaaactaaaggctggaaatagaaaagactttaatttttccttttacacactttaccattggaactattttactttaaaaacctttttttttttaatgtttttgaggcagggccttgctgtattgctcaggctggtctcgaactgctggcctcaagcaatcctcccactcagcctcccaaagtgctaggattacaggaatgagccacgagacctggctaaaaaaaaaaaaaaaaaaaaaaaaaaatttatgtgcttatatgtctacaggtacttttgtagggctttagaacccttatagcctgaagtcaagagaaatgggccccactcttgattgcagcaaggatgcatcacagaacagtttgagccttgtctttattcctttcagccttttttggagggtggggaatcatcttgattgtcaaagcagagccttggggaaattctcagagcagatattcaagggtcattttcttacaggataaaggaggacaaatggatgaatgttcaagtgggagatataataaaactagaaaataatcagcctgtcatggtgagtacctcttttggctgtgacttgytcttttttggattgagtgggtaccagggactcttggagcacttctgctaccactccttttggtgacctttgttgcccattttgcatcagaaatcaacagctcttgcagtaagaagcttgttcttgcctatttctcactgtagttacagggaaagtgtgagtagctttgggagagggtgtatgatagcwgtgaaagaaagtaaatcagtgtctgtaaaatgcttaggttgaacatctgttcctaaggtgactgcttttgtcacactgtaatgttaacagcccaccttcctgctttcctgactttttttgacttttctgactacaggcagatatactattactctctagcagtgagccatatagtctgacatacatagagacagcagacctggatgggtaagtgttccctcctgatgctccattaagatgatttagccagcttagagtggtctctcactgagggacagcattaggcagggaattaattttattctcagatggaatattgaataggtgagccagagagcctagaaatatccagataagagaagatggacaccacatcgttgggaccctcaagtctaagactgagctcttgacaggaacaattgagcattcactgggcacagaatagggcaaataaaccccacattctccatctctaaattggagacactctggccatattctataaggctgagtagcaggaaagaggataacagaactgtaacatttcagagtacagtttcaaagtttccaagggaaaaaatgtgaatataaacatatctattcactgataaaataccatgttctataaaggatttaaggtagacatttattaacatccaaaagctaaggtcttaggaggatagagccatctgcagaaagcttatcctggagagttttgtattgatcttcattcctacaactgtacttcttgatgcacacaattttttgaaacatggattccatttttctttttgtctatgcattccagcaagcagttacttaagagcctgtcatgggccccataaatatttatgaggtgtggagtatgtttcctcggaggtatgtgcaagtttttaccaggatctgctccttattctttttttaaaaaattaaatttaattaaaaaaaatagagacagggtctcgctgtgttgtccaggctggccttgaactcctgagctcaagtgatcctcccgccttggccttccaaactgctaggatcacaggcgtgagcaaccatgtctggccatactccttattcttttttttttttttttttttttttttttttgagatggagtctagctctgttccccaggctggagtacagtggtgcagtctcggctcactgcaagctccgcctcccaggttcatgccattctcctgcctcagcctccctagtagctgagactacaggcgcccaccaccacgcccagctaattttttgtatttttagtagagacagggtttcactgtgttagccaggatggtctcgatctcctgacctcgtgatccgcccacctcggcctcccaaagtgctgggattacaggcatactccttattcttgaagggagcaggtactatctccaggttgtttatgatgtttcttcagcctctctagagcacctgaccagctagatctcatgagttgattaagtagtggcagtgtgttgcagagagtgagaggaaagagacgggagtgagtgagctaacactcagcttccttgaagagccatctcacctcaatactgagagagaagcagtgggagtgacttttacagctcagactcatagcccagtctctactggtaacatctattttctaaaaccccatgaaaaagtaggagatactgcacccgtacaacagttctgtttgtgtcctgtacagtggtcacktgtcttttactctagtgaaaccaacctgaaagtgaagcaggccatctcagttaccagtgacatggaagatcgcctggagcttctgtctacctttaatggtgagttaggaaatgggttttcctacctaaattttcatcagtagagtactggttaaataaagtatggtacatccatagtgatttctatacaacttattacaacaatatgcaagttgatatttattgaaatataaaaaatacaacatgtaattaaaagaaaaatacaatttacaaaagactgcatagtgtatataacataaacctgtttttggaaatataggtatgtttatgagtacttacatagaaaaaacatagaaggatgtacttcaaaaggtaaatagcacttttctcaagacagtgaatgaattttacttccttctttaccattttagtattacttaaacatttacaaagggcatatttactttactaatcaggaaaatgtcaagttgtttccattttgaaaaaaaatactaggttcgctttgagtcgtttttgagtttcttcagattcagagctcttatgatctggcagtactgatgtcaccatcatgtggggttttctctctctctggatgatccatgtcacatacagaattattcttctttagttcccagaaacctttgtctgcctttcttgaaggagctggtgagaaatgggcagtaactgagagaggataggaaaaagatgtgtatgtattttgaaagaagaattttatttcctcctttctattaagtctcctttcatccttaggaaaagcctaagattagagayccagaactcttacaccttcatttttctgcaggagaagtgagatgtgaggctcccaataacaaattggacaaattctcaggaatactgacctataaggggaaaaactacttcctggaccatgacaagctgctactctgaggctgcaacatcaggaatacagattggtgctatggcttggtgatctacactggtacgtttcccttggcccccagcctgctaaattccattcatggmtgagctatgggtacttagttttcaggatgtggatatgacactcagatatatttcagaacactatggttttgagatagataggcaggtagaaggatggatggatggatggatgggagatttgtgggaaaaaaccttgtttcttagggaaaaaaagtgccttctgtttccaagcaatgaacttccaacatatcggttctacctttgttagaggaaggcattgtgttccaaaaccacagggcatccatgagtctctttaacaagatctggacacaggagagggtatacatacagaggaagtatgatagaattaccatgtgaagggggagagtatacatatgaactattcccatgaagagaggatggacacaatgcttattatagagaaaaatataatgtaaaaagttcatgccacagaaaagtcacatatggatcattaatagtggcccctcttgagatgttatttagaaccacaattcattatatttagtaagagattttcttgggttatgatgtggttcaggaaaatggaggaagcctctgtgctgccccattctctcagtgacaacaaccatagtaggaaatatcaagaaagatttaccacagtgaatattattcaactcagattcccagagctccccttctagagcatctactcctagacatgaggcttttagactccttgcttctgtgaaaagtaatgagaccaaatccctagggagaagcttaagcgtctagggaggccctggtggaacttccttcattggttcttgatctagagtggcaatgactaggctacctaattcccaaactcaaaagacttaaattagacttactttcttcactgtatgtacttcagcagctactcacacacaattgccactcataaaagctcatttttcagcgaaaggtttttttcctgaaagcaataayagtggggctgccaaccagcacaaatgtagttaagttttcccaaggttggttacatggtagtgagtatctttgggaagctctgagcagagaactaatgccacctaaaagcattttgaggtgtttgcatggaattgagttgctgttcctgctacatgatgtccaagttctgtgatgatttctaccttcttcctgaagcctggggtaaggtcagtctaaggacccttagaagatatggtccctgtagcttccaggctatgagccaaacttctcatatcttgaagcccttcaaggaatgcttaagaggaaagaatgtcatagcttatgctctgcactcccactgtttgcccacatatcagagatgtcccagctccccatgtgtaaacattgatgaaattcctttttctgtcctttatcagaacacatgttagaataatggtcagatggtgaaaggccagagaaattattgcttacagtttcttctaaacctcttacattttctctggagccatagctcgaattagtaatttccagctctagtcccattggccattaaaagctccttacttctgcctaccatctgtcctgtcatgaagaaacatggaatctctgtctctcagctccagaggagtctcagctcccctgcttccacctcagaagaaatcactgccattgccttttcgtttcttccattccgagttagaaactttcagtatagcctgagccagcagtgagctttctcaaaagatgatggggatctctttatcagaaaattccttctctaagctaaataaaccagatggtgataagagagaagcttgcaactcctcttctaatttaacgcatctatgaaagttgagactgtctgaggtgctacaaagagagggatctgcatgaatgtactttacagaagtcattggaactatccttagaaaaaattttccgttttttgagttattgaaaaccgtgagcctttctctagggctttatcctctagcattggaaagtggttagattagattatcataaaggtacagttcagccaattccaagcctctgagtatattcagtgattctaatatctgatatcttcctgttttatttagggccagataccaaattaatgcagaatagtggaaagtccacttttaaacgaacacagatagaccatctcatgaatgtccttgtactctgggtaagttaaatacttttttttctttgtttctttacaaatagacatacttcccttcctttcacaggagaaatggtatttccagttcagaatttagctgtttgaaagtctcaagcacagcttcaagtgaagttaatctgaggtgaagcaaacagaaaattgtggaggttttgttggtgtgcaatggaggaacatggctcaagaaactaatcacagccaagtacctatgctttgttccactggctgcggattttatggaaaccctcgtacaaatggcacgtgttcagtatgctataaagaacatcttcaaagactgaatagtagtaatggtagaataagccaamctgcaacctctgaatctttaccagttcaatgcacagatggcagtgtcccagaagcccagtcaacattagactctacrtcttcatctatgcagccaagccctgtatcaaatcagtcacttttatcagaatctgtagcatcttctcaattggacagtacatctgtggacaagcagtacctgaaacagaagatctgcaggcttcrgtatcagacatggcacagcagccatctgaagagcaaagcaagtctcttgaaaaaccaaaacaaaaaaagaatctctgtttcatgtgcaggaagaaagtgggacttactaggtttgaatgcggtgtagaaatgtttactgtggtgtayactgttactcagatctacacaattgctcttaaaattacaaagctgatgccgctgagaaaatcagaaaagaaaatccagtagttgttggcgagaagatccaaaagatttgaactcctgctggaatacaaaattcttgatcatctgcaaactaaaaattgacttgaggtttttttttccctagtcattgggaaagtagagcagtgtatcttgcatgtcatcggatgaatagatttttgttttgattttgttttgaaaatgactctgaacatttatttccattgcaatttctgtggctgagaagacttaaactttacaagtattatccttataagatcattttaattttagttgagtgcagagggcttttataacaaacgtgcagaaattttggtggactgtgatttttccagtattaaatatgcatgcattaatcttgcagtttattttctcattgtgtacatatatattgcttttctttgcagcacgatttctcttttgataatgccctttggggcacaactagttatcggtaactgaatgtatcttaatcattatggctgcttctgttttttcattaacaaaggttattcatatgttagcatatagtttctttgcacccactatttatgtctgaatcatttgtcacgagagtgtgtgctgatgagattctaagtttgtgtgtttaaacttttttttgagcgagggaagaaaaagctgtatgcatttcattgctgtctacaggtttctttcagattatgttcatgggtttgtgtgtatacgatatgaagaatgatctgaagtaattgtgctgtatttatgtttattcaccagtctttgattaaataaaaaggaaaaccagaaaaaaaaagtctcaagcagtcttaggatcccagagattaagatctgaggcagaaaagaacagacaaattacaagagagtctagcttacgcctgttaggaagaatagtcacaaagtgtttaaaaagatatcatgctttgattagtggtacaagaatggatcaaggacccagtttagaaattaagacatatttttattttctcataatcagttttactcatgaccactttaataaaaccttacttagactaatagaacaccttgtttgaactgatgattttcaaactcttttcttagaggagtcttaaggtctggtgcagtgggaatagggaagatcaagtggattttattctatcctcctcattttgaagttcttgctttaaaaagaacagcttcatgtttatctattttatgaaatttcagttgtaaaaatagaagggggttctattaagaagtgaaatttgaaaagcactgcaatatataataatcagctttgataatagatgtttaaattgaagactagttaataaattatttctatgctgtctgatataagctgcctttattcttattagttatagacagattaatttcctctcttaaacagcttctttgcatagctgagcagttcctgtaatgcctacacttgatctcataacttttcatgtttatttttactctattatttagactctgaaaactcaaaaaaaaaccttttctttgtacactcttatcattaatatctgaattataaactgccttttttctttattatgggaaacatcccagatccttttcaaaatcctttggatctagcaaaaggggttttagaaaattaggaaggttcattcagctcagaatctagtattcgttcattatacttctctttctattatggagtaagtagttttcagcagttgatcaaagttccatttcctagtttcttaatgaagaagacaatcatggtcaagaattaaggaaggtaacatgggcaaatatgcttttgacaacattagcaacatacatcattagacagtaagctaggtcatttagcctaggcttgtcttcaaaacaggatgtcttcaaatgggtgtgatggcacacacctgtaatcccagcaggttgggaggccgaggcaggaggattgttcaagcctggaagtttgagagcagcctgggaaacagtgagaccccatctctataaaaaacaacaacgaaacacaaaaacacaggtggaacaagatggctgaatagaagtctttattaatcaccccccccacacacactcccacaaaaacaccaaatttaacaactatccacatataaaagtaccttcataagaaacaaaaatgagtcgaacaatcacaatacctggttttaacatcatatcaccaaaagaagcattgaagacaatcttgaattgctgatgccaccattcccccatctcctggtggccatgcatggtgcagagaacttgtaagctttggggagggagagcacagcaattgtggaaccctgcattgaactcagtgctgttctgtcatagtggaaagcaaaaccaagctgaactctgctgacacccacccatagagggagcatttagaccaaccctagccagaagggaatcgcccatcccagcagtcagaacttcagtttcgtcaagcctcaccaccttgggctaaagtgctctggggtcctaaacaagcttgaaagcagtctaggccacaaagactgccattcctaggcaagccctagtgctgtactgagctcagagccagtggacatagggggtcggggtgggtgcacacaacctagtgaaacaccagccagagcagagaagggagtgctaatgctacccctcccacaaccccaggcagcacagcttgcagtaacaaaagtgactcctttcttctgcatgaggagatggaagagtaaagaggcctttgtcttgcaaattggagaccaggtcagccacagtaccatagggcagtggacagagtcacgaggcccccattctaggccctagctcccagacagcatatctagatacaccctggaccagaaggaaacctgctgccttcaaaggaaggacccagtcctggcaggttcatcacctgctgactaaagagcccttgggccctaaagaaccagcaacgatacccaggtagtacattgtgagccttaggtgagactgtagagtggcagcatctagacgtgctggcttcaggtgagacccagcacattcccagccgtggtggctatggtgagagacttctgtttgagaaaaacagagggaaaggtaaaaaggactttgtcttacagcttaggtaccaactcagccacagtggggtagaacatcacgtgggtccttggtgcccctgattccagccttggctcttggatggcatttctggacctgccttgagccagatgggagcccacttccctgaagggtgagtcccatgactgacagtattcaacacaagctgattaagcccttgggccttaagtgaacattggtggtagcctggcagtaccctctataggtctttgatggtggccatgggcactggctcctttgcctgtggaaatgggagggaagagtgggaaggactttgtcttatggtttaagggtcagctcagccatagtagaatacagtaccaggtagacttctaaggtttttgacttcagtccctggctcccaggctgcatctccggacaccccaggggctgaggaaatttgctgcactaaaggaaaggacataagcctggctggcttcaccatctgctgattgtggaaccctggggcttgaagtgaacataggcagttgccaggtagtggtcacagcgggccttggatgagacccagtgctgtgctgacttcaggtgtgactcagcacagtcccagtggtggtagcctcagagttgcttgtgtcaccccacacacagctctaggtggcttggcacagagatagactaaatctgttagggagaaaggaaagagaacaagagtttctgcctggtaatccagagaattcttccagatttattcaagaccaccaaggtgatacttctatgagtctgcaagaactgcagcattattgggctctgggtgccctctaatgcagatatggcttagatcacaacacccaagtcctttcacatacctgtaaagccttcccaagaaagataggtaaaaagaagcccaggctgcaaagactatacaaacaattaataactaactcttcaatgcccagacaccaacaaacatccataagcatcaagaccattcaggaaaacatgacctcaccaaacaaactaaataaggcaccagggaccaatcatggagaaactgagatatgtcacctttcagacagataattcaaaatagctgttttgaagaaacgcaaagamattcaagataacaggaaggaattcagaattatatcacataaatttaacaaagaggctgaaatagttaaaaagaattaaacagaaattctagagttgaaaaatataattgacatattgaagaatgcatcagagtattttaatagcagaattgatcaagcagaagaaagaattagtgagcttgaagacaggctatttgaagatacccagagaagacaaaagaaaaaaaaatgaagcattcatacaaggtctagaaaataaccttaaaagggcaaatctggccaggtgcagtggctcacgcttgtaatcccagcactttgggaggccgaagtgggcagatcacgaggtcaagagctcgagcccatcctggctaacatggtgaaaccccgtctctactaaaaatacaaaaaattagctgggcttggtggcgggtgcctgtagtaccagctatttgggaggctgaggcaggagaatggcgtgaacccgggaggtggagtttgcggtgagctgagatcgcaccacggcactccagcctgggtgacggagcgagactccgtttcaaaaaaaaaaaaaaaaaaaaaaaaaaaggcacatctgagagttattggccttaaacaggagatacagaaagagatatgggtagaaagtttattcaaagggataacagggaacttcccaaatgtagaagaaggtattaatatctgagtataagaaggtttagaacaccaaacaaatttaacccaaaaaagactacctcaggcatttaataatcaaactcccaaaggtcaaggataaacaaaggattctaaaagcagcaagagaaaagaaacagataacatacaatggagctccagtacttcaggcagctgacttttgagtggaaacattacaggtcaggagtgttatatataaagttttggtaccacaaagaaatagcactcaaatataaaattttctttttaattctcagcaaggcaagttacttctatatagaagggtgcgcccttacagatggaacaatggtgagcgcacacttggacaagggaggggaaggggttcttatccctggctcacgtggcccctgctgctgtgttgttcccctattggctagggttagaccgcacaggctaaactaattccaattggctaaagagaatgatggggtgagtgctttggtgggagtcacggcagagaaggtagcaggtagcaggtaattggaatgagttagggtggagcaggtgattggaatgtagggtggagcaggtgatcagaatgagtcagggtggagtatataatcgaaaaaggttgcttaaagaggaagtttaaaagtagaagaattgaacatatggacatattaattctttgaaaagaaatttaaaactcatttctaataatcccttcccttgtatttccttacagctttcttttcaaactttttttttaacatgtcttggcttagttgttttgcttgattttctaaaagaagcagcttctctggataaggtggaagatagttaagggaggttttagtaagtgccatttttatgagcctctgcatctacttaaggatgcatggtatgacacagcacctgacaagaataaatacacctattacagctgtgagagaagtaagacttgaggctatcattccatctaccgaacttttttttagccatcctgtaaaggggtcatttacccctgagttgctggctaactcattggatagagcagtcagaccttgcaatgcttttgttatacttttattacgggtggtggtgtttgggatgaaggtgtaacgctgagttttaatcatgacgcaaactcctcttctttctgctaatatcatgtctaaggctatcctattttcccaagccacctggctattagcccctaattgctcagctattcctttaacagcatctctaatgtagttaataaatcgctgttgattgtaatagatgtagtttatccaatctacattttattaattgtcacccaccaaaatattgactcaaatcctgcagctatttgattttgggctttaaattgatctggtattccccgtgggactttaattgtgtctaaatagacgtgagagttgaaagacctataatgggcttctctcgctttacaatgtctaatttttctggttgatgaaatgccagggtgaaagggatagccaactggactaaagcacaagtgccactccagttatttggcagagtgtccagtaaaggtccaccacacatccacttggggatgaacaagggctgactgattgataagctcttgaaaattcttaagctcactgcttcccttcaggtctccaaggaacactaagtttcctccctgtcatgagagacacgaagggaacttagtgttaggagatggaaactggatggcccttgggggctgacccgcagggtgccagagttcgggatatagcagagtgagagcttggcatgacttgttaccccaggctgtagaatcttggaaaagagctaccatgcagcccatgcctggttgactggaggaccaccctagtggaaaggggacagtctgggcctctggcctgccgtgcacacaagcctaacaattgtttttgtttaacgtgcrgacagaatagttgatccatttcaaccaggcatttacatccttagtatcctgtctcaattgccaaagtttgttttaagtctttaacttctaccatcactatcttggccttgtcactagatggaggaggatcaatggttccattgtgagaggttttggaaaaaggcttagaggcagatgtaggcggcaggggatcaaggaaatgcattttaaagaatccaatagggtctgtccctgaaacctcagcccccataccataaaactggcttaaacaagggaaccggcttagaaaaggggagaactttgggggcttgaaataatagcctgtatagggttgcactggtttagctgacagttaggggggctgtccctttagtaaaatgaatgtatcgttttaggaaattataaaaactggttggggcagtctatccttgctctttagtggtccacagaacgttggaccaactacggcataaaagctctacatcggggggcaagactcatggttgacactggggtctttatcaaaatctccctggattaaatggtcccaatttactaatgcccattctgaggagagtcaggagggacagaggtacttttctgaagtagagagctgtctttgacttggcaagtccccacaaggtataacaaggcaagcattaaatgcagtagtttgaggtgaaattgacttggttatgttaataactggatggtcagcaatagagcgaggaaagaagaaaaagtaatggaatagatgaaagagttaaatttttcttagctttagtttggtagggttttcccctgggattgtggcccaggactctggagggagtggcgctttgactcgtgtgtgatgagtccatccctttttcactgtatgaacagcagtctcggtggttagcagcacaaggtagggtccttcccatgctggctcgagttttccttctttccactttttgatgagaacgtgatcttcaggctggtgctggtttactggaaattctaggggtggtacctgtgctaaaagacttttagttttgagggaagataaaccaagtatataatttctaagaaattgaccttttgttttaaacgtggggacatcagcagtggactttatagtctttggtgccttcttactgagaaatttcctttagcacctatttttattagtttttagaccaaagaatgccaaacaccattttatatttaacaatgcttcctgtatgatttttataccagataagctaaatttcacctttatattagtgtgttattaatgttaaacttaattttaataaaaccttgtagacatatttatccagtttttaatgtctgaccataaggtaagattttatagactctttttaaccttttttataatttttgttaaggagcaggttagtgctttagaaaaacctgttgtgcttttattttaatgtctagttcacagaaaaactggttacctctttaactttagctaatatgtttacatacagaatttcctttacaattaacgttttaaaacttgcttagacctttaaaacaaaatatatatatttttcaccttttaatgtaggtaaaaattcacattcttatgcctccttataatcttgttaccaaaagtatattttactttccttacacaccttgcacataaactgtttcttcaatagttttacatttaggaggtctaattacttttaaattatacaacatttcttgcataaatttccttttataacctttttttcacacaactttcacagataattcttcgacatgcctcaactttctttcttttttttttttttttttgagatggaatctcgctccgtcgcccaggctggagtgcagtggcgcgatctctgctcactgcaagctccacctcccgggttcacgccattctcctgcctcagcctcccaagtagctgggactacaggtgcccgccaccacgcccggctaattttttgtatttttagtagagacggggtttcaccgtgttagccagggtggtctcgatctcctgactttgtgatccgcccgcctcagcctcccaaagtgctgggattacaggcgtgagccaccgcacccggctcaactttgtgacttgttgcaaacatcccttttttttaaaaaacaattagttaatttattttaggacaagaatttaccgtatagcattctttttacataaactctccccccacctctttttttctttttcctttttaaattttcctaaagatgataaccattcttttytaaagcgaacttgcttcatgtctgtggactagactgcctaaggccataagattagaagttaggataatacgtgttatattgataacttttagcaaactttacttttgtcgaaaaccttctaagtttgggatttcaattatcctttgctgttaataagaccttgtttagtctaaattaacttagaattggtatagatggttccttcctggtctgtgagtacgtcaaggcttggctgagtgcaaacagcttgcaggtttgagcagaccagttattaggaaattttcctaactctgcttctacaagagtttccctatcaattactgaatacccactgtcgtttgtttttttttttttcccctcaatcaaccgggaggaaccatctatcgtcctgtcctgaagagggttcctcctaggtctggtcggacctttgtatggtaattaagatttaaatccccagttaggaaacctgctgggttaagggaattttcagtggttaatgataaatcatctttttctaacagaatagccctatactttaagattttttagtaagctacctttttgctttttgacttaggatagttctgaactggtgaggtgtgctcacaatgaggtttcctctaaaagttatttttctactttcttctgttagtaaagcagttgccgctatagattgagtgcatttgggccatctgctggttactgggttaaggatttttgataggaaggctacagattgtcagtggcctcagtgctttcgggctacacccttgtttacactgacaaagaggtggtattggagtgttatagggtcacagagaagaccttcaattatcaactataggttttaaatttaccctggcttttaaaggaatagggtacactgtttttttctttactacttctatttttctctttctttctctttgactttctctctttctctctttgactccctctttgtctctctgcctctttcccctctctctctgcctctctttcccctctctctctctgcctcttcccccccccacacacctctctttcccctctctctctccctctttcccctctctgtctctctctgcctcttcccccccacacacctctctttcccctctctctctgcctctttcccctctctgtctctctctgyctctatcccctctctgtctctctctgcctctcttcccccccaccgcgtctttccctctctctctgtctctgcctctctttccctctctcctctctgtctctatctcgctctcctctctgtctgtctctctctgtctctctctctcttcccctagggtagggacctacgggagtggaactactctctcttcccccaagaagaaaggaaagggcagcggkggggttgtgtcaggttcaacccttgaaattagcagaaggctcaacccctcaacaccagggatgtctcaccttgcccgtcctggaaggctcaacccctcaagccagggggtgtcttgcctgtcctggaaggctcaacccctcaaaccagggggcatcttgccttgtttgccctggaaggctcaacccctcaaactagggggtgtcttgcctgtcctggaaggctcaacccctcaaaccaggggtgtcttgcctgtcctggaaggttgatctgtttctccccttttccccctctgaaggtcctttgcacacttcctactcatgctgccctctctggctgctcccccaaggtagaatcaggcccttcttagtgttggcatgccagtataaatcctatggcaggatccgccctaagccatatgaggtagctgtggaactgcagagaggacccactcactccgtcgagcagtaggacttgtcaccatccacatgaataacaccacaagcagggttgttggtgatcattcacacacacacacatttagccctccagaatttgaccaccaaggaagtactttacgggctcccatggcatctccttccttggtctgtgcagagtcatcactgcagtatgtgaggatcatttaagctaggttgctggccagtaccccctctccctgacccctcgtgttgttaagagctcaggttattcctcacactgggtgggtcttgatttctcacccctgaggccgccacaatagggccgggtgcacctcctcacgagagagaaccagagacagtcctggaggggaatgtaatcctggacgagccccccaaattgttatatataaagttttggtgccacaaaagaaatagcattcaaatataaaattttctttttaattctcagcaaggcaagttacttctatatagaagggtgtgcccttacagatggaacaatggtgaatgcacacttggacaagggaggggaaggggttcttatccctggtgtacgtggtccctgctgctgtgtcattcccctattggctagggttagaccacacaggttaaactaattccgattggctaatttaaagagaatgatggggtgagtgctttggcaggagtcagggcagaagagcaggtagcaggtaattggaatgatttcgggtggagcaggtgatcagaatgagtcagggtggagtaggtaatcgaaaaaggttgctttatgaggaagttaagtttaaaagtagaaggcaaataactgaatatactgacatattaattctctgaaaagaaatttagaactcatatctaacaggagagagtggcatgacatatttaaaatgctgaaggggaaaaaactttacctagactagtatatctagtaaaaatatctttcaaacatgaaggaaaaagaaagatttttccagacaaacaaaagttgagcagtttcattaacatcacacttgtcctacaaaaaaatgctgaagagagtccttaaactagaaagaaaaggacgttgagcaataagaaatcagccaccatacctggcttcattgtagttttgatttgcatttctctgatgatcagtgatgttgagcaccttgtcatatacctgtttgccatctgtatgtcttcttttgagaagtatctattcagatcttttgtccgttgttaaattggactattaggttttttcctgtagagttatttgagctcattataatcccagcacacaggcaaccaaagcaaaaattgacaaaatgggatcacattaagtttaaaatcttctgcacagcaaaagaaacaattagcaaagtgaagagacaacccacagaatgggagaaaatatctgcaaactgtccatctgacaaaggattaataaccagtcccaaacaaaagaactgcttttgaaagaaatttaacaacctacctgcagagaactaaggcttgtaaatctgagtgtcagcacttagagtaaaacccacttaattttaaatttggggggcttgagtttgcctgcaagtttcttgtacatcctagggtgaaatttgttaaaaaacgtattctttctaccaacagagaactcatggtttcccattcaagggagtggcctgttaggaaaacaaaattaaccaaaagaaatgaaatctactccagcaacctataataatcaaactattattttacttatatttttaagtggactagagggaaacaagtagcataaaaaggtggatgaggatgaacaaatagaataactgaccctggaagctgggtgtggttcccagctacttaggaggctaaggcaagaggatcacttgagcccatgagttcaaggctatagtgcaccattactgcacctgagaacagccactgcactctaccctgggcaacttagcaatatcccatcttaaaaaaaaatacctgaacctagaataaacaaattatatttcagggaagagaaaagaaaagaactttaaaacatttttatgactagtctcagagaaaagaaacaattacatatataaaataagaataggttgctttaaaagggggaaagaagaaaaatatctaagaacaacaacaaaatagaatttgggaaatcaaaaatgggattgctaatatttttttaaaacccattaaaggattaaaatctctcctggaccataaaacaaaaagacacagagacagaaaatattagagaaataatttgtttttaaacagaggatcaaactagaaaggtttagttacagagaagagaaatccctttaaaattcttatagagataaaaataagatattaacaaaaatgggaagcagattggtatcggatttctcaaaagcaccattgggtcctagaaaccagtagggtcataccttcaaagttcttagtgaaaaatattttgacctagaaatctgtacccaggaaaactgcaagtcaagtaagagagcaaacttgttcctaccctaggacctttacccttgctggcaatgtctgcccccaagtctttgcatggcttgcttctttttcatcatttaatgctaccttttcagataaaaggtctctaacacccccatcaagaccctctattctattaacctgttttattttcctcacagcatttatcactaaatggtatttttttcatttcttgtttgttgtctacctctctccacaaggatgttgtcttttttcaccactgtgtccctaagtccctggaacgatccttgacatataatgggagcttcattattatttgttgagtgagtgaaaaaaatgaatgaacgtcttagccaacagattatgagcctctacagtagaaattacaccatattcatcttcatatttttggaagtgccttgcacaaagtagtgcttagtaaatctctattgaattattaaatgaagaaatgttcttgaattagctaggttcttatcagctcagcagttttgtttctgtggtatttgtgccaggacattgtcaattagtcatatgtaaaacacttccatttcttgaagtaaactgaaccagaaatccttcctgatttaaacacttcattttcccccattttttggaaatgcctcttagaagaaaatctggcagacacaggaagcacgtttagcaaagctccttcctgatgagcccaccgctgagctgggggttagatcccttctctctccccagtgaccagaactcccagtgacaatgccttctaaatcatgatctgttaactaggagtgtatttgtgagacaaatgagcaaagtgcatgaaattgaaatggtgccagagatccaggatctccttctggggtaaggcacaatgtaaaacacagatgtgaagggccaaaagcccaaggagtgctttcttttgacaggctgcctgaggccagggagcacctttatgagaccagtggccttgattttggtcagttttgtcaagagtgacaaaattatttatttcactctttattgaagccacttyttgctaaatgggaggctgtctgtgcttctttggtctgactagctctggtattaagtaatctctagggtctgtagcaataaccaaacaaactgatgatttattgtttctttctccttatggaaaggaagtaaagtgaagctttaaagactaagtaccaaaaaaccctatcacaataaaaagaaatgtagaacatctgcaagggctttgaaggcctcatgatggcaggaaaagctctagcaatgaagaaagaaaacactgtgccctacaccttcaggattcaggctgtcagggtagccctgctttctggggcttgggctgataagaagtggtcttcctttctggtggcttagtttgagcagtagaactcaaactcagatcaataattcactgaggctttatctgaaccatgagaatagctttgttttcacatgattaattgaagagaaagataagaagtgggaataagattgagaaggaaagattgcatggccccagagaaaccctcatcacaaagagctgagctactcagtgtgaatctggactgggctaggaataaaagcagattttatgtgttttatcccaattctcctttgttttgttgttccccggcccctcactcaactctcaaataccagtttttgatactgaatgatattaagcgtttagtgctaatttttaagtgatactggttttgattgtgttttaaaataagatcttaaccatttagaactatatattaaacagatgaaattgcataatgtgacagatttattctgagaaggcaggggaagaggaggtttggatgaaattagactggctatgaattgacaattgttgaagctgggtgatgggtacacgggtgcatgggggtttgttgtcctatttatatactttaattggtgttttaaattttccataataaaaaataatttaaaatatcagtttctgggaatggtcccagttagacctgttcctcctacttttctagtcttgtcttcaaagaccttcccatcagtagcacaaagatgaaacctcccattatctagcaatggggatggtttgctttgagccagccatactttgtgaccaaggtcacagatgtgaagactcttgggtagatgtaaagactgttgggtagacttcgaggtggttcaataacatcatgttgtctctagaggcaggtggacatatagtgctggtaggaatgtaaaatggcataataactttggaaaacatttggcagtttcttaaaaagttaaagataaattttttataggatccagtgattgtactcctagatatgtacaaaggaaatgaaagcttatgtccatgcaaagacttgtacacagatgttccatacagccttgtttacaatagtcaaaaactggaaacaacccaaatgttcaataaaagaaaaattagtacacaaattgtgcaatatcaatacaatagaacactactcagtattaaaaaaatgaacaattgatagatgcaaaaacatggatgaatcccaaagtcattatgctaagtagaagaagccagaaaaaaagagtacatactatatgattccatttgtataaaatctaaaaatttcaaatattctaaagtgtcagaaagcagattagtggttgcctgaggaccaggggaagggagaagtgggaaggtggggaggaggaattcaaaggggcacgagaaacctaggaataatgaatatttcactaacttgagtatggtgatggtttcacagatatgtgtgtgtatgcgtgtgtgtgtatgtctagtatatarttgtatactttaaatatgtgtgattttagggggatagtgactgaaaggggacatagggtggtttatgggtgctgagaatattcaatttatttgttctgggtatttgttccattagtgtgattactttgggaaaattcatcaacatatatctgtgatttctgcatatgtctttatgtgtgttaataattaaatgttaaataatcaaaaatagagggcatcagattaatctggaactatgagtagtatagttgtattagtcaaaataagataaccaaaataaaaaaacagccttaaaatctcagtgacatgtgacaatacaatgaaggttgttgtggggaggggcagcttgctccaccaataactcaggaacactctttctagctaatggccccaccaayctcttggatttcaggatcttctactggattccctgcattcaaccagcagatggggaaaaagagagaataggaagactcacacatgattttttttcttttctttttttttttttttgagacggagtctcgctctgttgcccaggctggagtgcagtggagcgatcttgaatcactgcaacttctgcctcctgggttcaagcgattctcctgcctcagccttgaggactgagtagctgggactactggtgtgtgccaccacaccccgctaatttttgtatttttagtagagatggggtttcaccgtgttggccaggatggtctcaatctcttgacctcatgatctgcccacctcggcctcccaaagtgttgggattacaggcgtgagctgctgcacccggccacacataatagatttttagggccaagcgtgtaagtagcataatcacttccaccagcattgcattggctagaacagagttacatgacccatataactgcaagagagcttgggaaatgtgctctagatatgtgctcagaaggaaaagaaaatagaatttaatgaatacatatcattatcgctgccacaatctacccttctgatcatcataccatttcacttttcctcccacatatggaacaccctcatcatctcccccaaatcctacccagtctctgcatccaactcagagtccaagatctctcactgatgcacagtcctctccatcagatctaaatgaagttcctcttggtctggagatgtgagaggatctcctttattcattgctctcagtgatttctggctccactcctgagaagttttccctcattctttatccttgctgaccaaccctgaagtggatgttggggagtatgctcttcttagggactgcagtttttataacctgcttcctgcccagtgtggttttaaggatttccaaacagtcacaggcttttttagaccaggctcatagttatctagtaataccattccttcaaaacccataaggcttctcatctgtttgcttccaattagtttcatgtatcagtaaccccctgccccccaaaattctttcctagacgtagtttttgagtttatcctgtttctttgcttccttgcccctccatgcccttctctctcaacttactggcaagaaagttgaggctatgcggaataatagtcatgggtaagaaggtatcacctttaacytgaactttgcccgaaggctgagtcactttattcagttgaaaacaattattgggccttttttgcttaaggtctcaatcttatctcttcctgtttagtgtctagaagtcgtagttctttgatgccccaaatttctgtacctccttatttctgcctacaaattggctaattctttccctagtttaactttaaaaaaaattttttagtacagatgaggtctcagtatgttgcccaggctggtctcaaattcctggccccaagcaatcctcctgtctggtctttccaaaatcctgggatggcaggcatgagtgactgcacccaaccaactctttcttttaatacctgtcaaaggcagtcaatacacaatgatattttgattctttttaaccacttctcttagagctgcaggttcagtaggcatatggtctacctttcagttttatcaaattctttcatgttaacatgactaccatattttcagccttttatatcagtttccttatcacccaccccctaactgctaagccccacacgttttagacttctgttaaagcagcttcaataatggaatgattacgtgcttgggttctggaactggttcaaaacctgtttcttctactcagtagctaagtgactttagacaaaattctttctcactcttaagttcctcatctrttattaaaagaggattattgtaaatattaaataatatgtataaatacttagcatagtacctagcacttrgttagttattactatgttttattactattatctcccttgaaaatcccaaggagggcttctgctggactttcttttctgtcctatgtactgctgcctagagactgtgaactatagggcctccctgccctcctaggmgagggacgctttgctgagagataaggctctagactgtagaactgaagcagcacatatgttggataaaatgttaatttaattcttttttttttcatgtatcgattttcctggttttaggcatcgtgtgttttgtcctagcagttgggcatggcatttggcagaacaagaaatgctaccacttccagatttttctgccatgggtaaaatatgtctcttcatcagctgtctctgccatcctcatattctggtcctacttcattattctcaataccatggtgcccatttccctctatgtcaggtaggcttctttgatcactttggggtgtgggggaggagctgacttcatactgtctacttaattccccaaccagagtgtgaacttttaaaaagcatacacttgtgctctttaacccctcactctccacagtaggtggtgtacaaaatgctstgagatatatctagaggttgcataaatgccttccatgtccagaatactgtgctaggaagacactatgtggtttatacaaaaagacagttatccctgccctcaaataacttataaagtaagtggctaaataagacataaaaacacatgaaataactagaaaacatacacacaaatttggtgatgcttaaagcatgggtagtttccccaggaagataggccaggcagcccatagtttaccaatgagataggtccaaacattcacttgtaagtcaattaatcagaattcagaatccattttcccacacaaacagtgtgacagatggtagataggtgtaattgtgacctaagttcaactcctaaaagttgtggaagagaagaggaagggtttcccttcctctttttcataagcaccttgaatgaaaatttgaaatagctgaaaaaagtatttaccctactctgatcatccttttctgggttctgcatttccttacacatacacacacccaaacacattttagtttcctcctttccrggctttctaaaccctgtaccggggctttttggcaataaaaaaaaaaggaccctatgtaactagattaccttatttagtaatatttattgagtatctactatgtgctaaggtttagagagattgctatggtggctgatatggtaaaggatgggaggggtcccaactccaggcatagagattatcagtaatgagtcaatgatgaggacctgagcacctccttcctcacctcaaaggaaaaaatccccatctgtcagtgcagctgtctcagacagggattactaataatcactcttataataaagcagactaacacacattaagtatgaatgatgataagaaggagaccccttaaaagtcttcactgttttaaaatgaacatgcttgttagccataaagaatctataatggacgctatttggagcagaagaggagtatgacagaggcaatagggaaaacttatataaaatgagaagaggttgttgtgggaggagacacaccacaggcaggctggctctgcctggaaatttatcagagggtcagcccataaactattcctgattttcatagcttctttccttcttctgaaataaactctgagtgtgtcaaggttctctgtcttccccatgtgacaggagcaataatcctccaattgggccaacacagccttttataagttaactgttactctatcacaccttgcattactgcagaaattccaaaattgtaacttttcctggatacattatggaaaaaaaaaaaaagaataaaagccaggtatgactcaaaaaagttaatcaagtatatctgggtccaggtggtaaagccttgggtgataatggccaaagtcagcattacaatgggttggctggtgggaagggtccttcagaagggtagaatcccaaggaagacactctgattttcagatgcttagccctgctaagaaagaaaccaggatgatatatttgcttgtcctgttctgacgcagaaccattcwttttctgctttctccttagtgttgaaataataagattgggcaacagtttatatatcaactgggatcggaagatgttttatgcaccaaggaacacaccagcacaggctcgtactaccacccttactgaggagctcggccaagtcaaatatgtgttctctgacaaaacagggactctgactcagaacattatgattttcaacaaatgttctattaatgggaagctctatgatatgcatgtcttcctgctttccccaagtcctgggaaatttttactttgcaaattgttttcaagactaatctagctctaaatctgtaagcctctggaattcacatttatctcctattctcacaactgtctctattctctaagcaaagaccacccagcccaaacagttctaaccaaaaagcatttatttagcatcttataggtacaatctattgtgttgggcattgagaataccgagatgtgcaagacttagtctctgtcctcaaggagtccccaatgtctatgtactcagttcactcccactttaaatcagatggatgttggtcaaagggtacaaagtttcagttaggcaggaggaataagtcttcaagatccattgcacagcatgttgatcctagttaataataatgtattgcatatttcaaaattactaaaagagttttaaatgttctcactacaaaaaaataagtatgcaaggtgataaatatgttagttagcttgatataatcattccatggtgtatacatatatgaaaacatcacattgtatccataaatatatacaattagtatttgtcaattaataataaaattaaaaataaattaaatggagcagtcaatgtattactgaagctgctaatttcttgattcccctttacagcaataaatattattgagagaaaccatcaaagggtagtcagagtttgatcagtgtctcccaggcccaatcccttatttatcttatgccttaagcataagcttgtttttgtgatagagttaagtcctcatgtgtgtgaacagtcatacccagtgtcctagctaacagaggaaggtaatcacatctaaaaaactagaacacatggaataatctttctggggtgacgaaaaagtttagaaacttgagagaggtggtagttgcacattgtaaatgcactaaatgcctctaaattgtacacattaaaatggataattatatgttaactaagtaaatttcatatcaataagtaattgaaattttttaattaaaaaaagctaggccgggtgcgttggctcacgcctgtaatttcaatactttgggagtctgaggcaggcggatcacctgaggtcagaagctcgagacgagcctggccaacatggtgaaaccccatctcaacaaaaaatacaaaaatattagccaggcatggtggcacatgcctgtaatcccagctacttgggaggctgaggtgggagaatttcttaaacccgggaggtggaagttgcagtgagccaagatcatgccactgcactccagcctgggtgacaagagtgaaactcctgtctaaaaaaaaaaaaaaaaaagactagagcactctaatatttcctattatttcctatatttcctattatttgtttggtaaccatgtcaaacaaattttcacttatataaactctgaaggcttatttttggatgagctgatttgggtgagcctcttaattctctgacctgaccatatactgggtaaagttgaaaaggaccatgagtgtttccatgcttggcatcagacatgtcttctacccctattcagtctgtcatccactggtcaagaatcccaaacattctaaaactgtgtccacatctcttctgggtaactcttatgattggagggcttcctgaggtgtgaagtctatcacagatccagtgactaacttctagcttcatcttattctcacttaggggagaagagttgaggcccaagcaaacctcttcttaccattggcttagggaaaggagcttactgggaactgggagctaggtggcctgaggagactggggggcaggcatcttgactgcaagtctaggatgaaggaatcagaataaataagcttttaaggcccctcctttaaatcaccatatgacccagcaatttgattcctaggtatatacccccaaaacttgaaaacaagaactcggatacatgtataccaacgttcattgtgacattattcgcataagtccagagatagaaataacccacatgtccatccacagatgaatggataaagaaactgtggtatagcatatacatacaatggaatgtgaatcatccataaaaagtaatgaaatttgatacatgctacaacatggatgaaccttgaaagcattatgctaagtgatgtaagctaaacacaaaaagacaaaaattttatgattctacttatgtgaactatctagaataggcaaattcatagagacaaaaaatagactagaggttactaggggctggtgatgggaaaaaatgggaagtttctgtttggggtgctgaaaaaatgttggaaatatatagtggtgattgttgcacaacattgtgaatataattaatgtcattgcattttacatttaaaatagttaaaatggcaagttttatgtgatatatatgtatatttttttaacaacaatttaaagaaattcaaaccctcctttaaaacccttgccaagtctctgctgtgttcacttaccaacaggtgatacttatgrcaaggatggacagagggtgacggtctctgaggtgagtgattacagctccatgggaaatgcatgtgggagctgagtgaggctgtgcttcagagaagcatccttaatacaaatcgagactcccttagccactgaaatattaaagcttttactggtcctgtaatatcagaaagcattatataaatgacctatgtttaattctgaagatcttcgtttgttctttttaaacaaaaatagctttattggctttttctctttaaaaaataatccatgctcactgtaaaaaaaaaaattaaataatacagaaatgtgtgaagaaagttaaaattattccatcccatttagatagccagtgtaaagttggggagtatatcctatgcttttcatatgtgtatacacacacacatatgtacatctagatctagaagatgggggagataaaatcatagtatgcatgctatttccagtttccttttgttcacttgacactattattgtcgtcatctttccatgtcggtaggtctaggtctacatcatcattttgaatgggtgtccactattcagttgtatcactgtaccttaatttatttaatttcttatttttattccattttcctttgcgattacaaatgacattttggtaatcattatggaacatacattttgtctacttttctgataattatttctttagaataaagtcctagaagtaaaattcattggtcaaaaggtagccacgttttaatacattaaatagtgccacattgccctccaggtagattcgcataactttataatcccaccaaaaatatatgacattttgttttcccccatatgcttgtcagaactggtattaacaatttttaatctgttgaaatttaattgatgaaaaatggtatctaattatttaatttaccttttttgatgactaattaggttgaatcatttttatgtgcttatttttcttccccttatcatctctttattgcccatttacacttactttgtgaactgtctattcatattctttggcctttttttcttatttgaaaatgctctttatacagtaaaaatactagctcttcctttttctggtgcatatgttataattatttttcccattttgtcttttggtttttaatttgttaaataatattttgtgtagaagtgtttaattcatgtaatcaaatctatcagtcattttcctttgtaacttaaggatttgtgacatattcaacaggctttataaaattataaaaatatcttcctattcattcttcttatctctagttggtttttactgttttctctagtattggacccagcttttgtttatggatttgtttttaagtgtcccttcacaggggttcttctgctgccttcagggtattcctcaccttatctctgtcttgctagacccaattccaaactgagccacttgacttatgtaccaaacatctgactccagttctcaactgttgccttacccctgtccatccaaagagattgggaaggggaaggaaattcagtgatttgccttaaatcatcttccaggggcttggctaatgaccttggcaatataggcaaaattatagcttctagggagtaaatccctcctggagtttctttcctctccttctgtccactactgattgaccgtaacacatttttcactaaatcactggaatttttgttctcttataaacaaacttacctatagcctcaatcccttcattaattgaaacatgattttccctgagaacattcctttttcttccatctctctcatactctgcataccataaactctggataccataagcccaaaggtgttgccctcattatcctgtgccatgtttaaccattagtttttctctcctacacaatctttcttcctgtgatgcttatgacttctggctatactcatctgtaactcttcttgttgttgatatctaggaagcttctggcttctacaccccattcattgagggctttgaaacttctccctcccctcccaaccactgctattgttttgggtggtattgtcatccttatggacgacctatcactgtagactctttcaggtctctgaaagaatccttcagatgatctcttggacaaaaaaaaaaaaaaatctgtatcacccatttccatgttaccatgtaattgtccagagttgtactaatgtggaattataaactttcttttcacaatctttgatcacaaaccttattcctccatattctcagtacatggctcgtacttgagatttttaaaagtattcctgcttttttatctcatggagatttataaacccttggctttcttttttctccagtctatcaattccttatgactttacttcctttcctagcttgcctgtctgtaccctgggatcataagcatcctcagtaccttactagttctccttttcttctctttaatcactgaacaaatctcaaccttgaattaaccaaaccatcgaccctgctctgtttctaatttgagagtgttaagcactattttggagatcataaaaccattacaaattcagagactccactgtcctctgtcccagtgccacttggcaaatttttcaccattttgtaattggcttcatattttattctccgtatcagcttttctaaacaatcaccattctcagaccttctaccacactctcctggctccccagtacgtagcaaatgatactgccttctattttactgagaaaaatccaaactatcagctaaatatcctcctctgtacatatattttaacccgcctttacctcctttccttcagtctcaaaagaagtataactttttccttcagtactaatctatatattgtagtttccatcccttcctacttcttcaggaacctcagtcaatcctgtattctctctttcttaatatctgactatccccttatatgattctttcccctcagctcgtcttttttttttttccccgcggagtctggctgcatcccccaggctggagtgcggcggcacgatctcagctcactgcagcctccgcctcctaggctcaggtgattgtcatgcctcagcctcctaagtagctaggattacaggcgtggccaccacacctgggttaaactttcccttaagctgttttcactgatgttgagacttagaatttccaaacatatgtagtgggaacaaattcctggatcttggagttttcttagcatccaaagtcatctttttggaacaggctaagcctcaaggagcctctgggtcatgccagataggccagatatggcgttcacctatagccatactcggaaatacagcttccctttgcttctccttccccactcagacagcctgtactcctgaccccaacacacacacaattgttactttgatgaattcattccacatttgaatgtgaaacctcccccaccttagtggggagaagcaacacctggattttgatgctctaagaggagtcccttttcctatgagaagtttttcagaagcatctcaaggattcccaagagaaacaacctcagaaacaattatcttgggagtcctacttttgttgccatagagtccaggaataacaggccagtcagcaaatagtagcagatttgtattctcccaagccctagcaaagccagtcggctttgtgggaggcatatgtgtatgcatgtgttgctgctgacctcttgtggctaataaagaaaaagccctctctaggtcccaggatggagcgtccagccagggaagggtcattgggtctattctgcttgccaatattaggcggtatgcagtgctacagaagccactgaatgccactaagcaagtaaagagtccaaagactgggcaaagtggctcacacctgtaattccaacactttgggaggccgaggcaggtggatcaactgaggtcagaagttcaagaccagcctgtccaacatggcaaaaccccgtctctacaaaaaatacaaaaattaactgggtgtggtggtgggtgcctgtagtcccagctactctggaggctgaggcaggagaattgcttgaacccaggaggcagaggttacagtgagctgagatcacaccactgcactccagcctgggtgacagagcaagactccatctcaaaaaaaaaaaaaaaaaaaagtacaaaggtttacctgcctaggaatgcaggggtacagctagcattccctagcaatcactctgtgtcctttctgtgcggggctgtataggttatggtgggattggtccagatccaccttgaaagcttggtgtkgccttactctatcctaggacctagggttctaataaagtaggatcaagtagagactggggtcaacattctcagtcaggtttctcctgctgtaggttaatgtgtgtgggggtggggygggggggcaggggtcgagggatgaaggtggctatcttggacctggaaggtggagctgggactgtagagaagagaggagcctacaaaatctccttggtattcttccagacagtttatgagacctggtttatcacatgctacagtctggtctacacttccctccctgtcctgtgcatgagtctgtttgatcaggtaagatccagcagcaagcccctggtcagcgttgaagcccctgggcccttgaggaatatccctaagaatgaagaatacagcaagagctgggctctacaaaatccagtgtaaagggaataatttccagagcggggaaaagagctcatcacctagataggtatcatgagataaagtaaaaaatcctcctcaacagagaataatcctcagttttagccaagttttcctgtatcaattttatctttgtagagagaaacatggaaattgtgctgtacagtaaattgagtatatataaaagtaattaaaatatatatggaaaaataaggaaaaattaaataacataagcagaatatgaatggaaaaaaataaagaaaagaaaatagagttattggggtaggactgggtaacgtatgggacttcaaaaaggagagactccttcagcgataatgaggatgagataagccaaagcaggagggcctgggagggagtcctgaaggccaggcatgggagtatgggtgtgatagtttatatcataaggagccagactaagggataccgtctgtccctgtcagaaattgagggtcctgggaccctacctctcccttgtcttctaccccaacctctagtcctgggcacatggagtagaaaatgagtctccaaaaaggaataaagtagctgaaataggacatcatgggatcatggctcttggtctccatgggaaatagctctaaaggaaattctccaggaagtaactgctaacctcagaacaacaagaggggtgggttgtattactcaacagtccatccagcttcagtggcctaattctagggatccatctctgaagccagccccaagctttgtatccaaagtttcagagttaggagatgaagatgatccaatgacatccactttgagtaattttttcaccttcagttcacsagtasctatgggagtgggagaaacctcacagaacatgaatacctctaaaagactaactggtccccattgatgttgctttctcccatattgacttttggcataaagaatattcaactatggccgggtacggtggctcacacctgtaaccccagcactttgggaggccgaggcaggtggatcatttgaggtcaggagtttgagaccagcttggccaacatggcgaaaccccatctctactaaaaatataaaaattagccaggtgtggtggcacacacctgtaatcccagctactcaggaggctgagacaagagaattgcttgaacctgagaagtagaggttgcaataagccgagatggtgccactgcactccagactgggtgatagagcaagactccatctcaactgaaagaactcttacacctggggacttatgtcccagctgcctcccccatctcaagctccagtcctccctcccagctacccacaagcctagttgctccctttcataactccccaattctaactccctccaagtccttcccagcatcccgaacttctcccagcttccttccactacccagatccttgcctagagagtaggacttcaggaagggtctgtggtcactgctgtgttctctggttccacttctccagtaacccataaggaagctcctaggcagcctggcagcagacctggtgaggggagaagcctctactctgatggagatgggaccttctatggagagaccctgagcctccctccttaccctcgggtgcttccaggatgtgaatgagacatggagcctccatttcccagagctgtatgagccaggccagcacaacctctatttcaacaagaaagaatttgtgaagtgtttaatgcatgggatctacagttccttcgtgttgttctttgtccccatgggggctctttacaatgcagaacgaaatgatgggaaggacatctccgactaccagtccttctccctggtggtgcagacctccttgatctgggtggtcgcaatgcaggtgtggccagtggyggtgggggtaaggggattgggtgggggcctctctgaaagagtgggaggaatagagggtgagagtgtgggaagggagcaaccttcattacataattggaggggggaggtagctgacaggtcccaggttacaggtcccataagagggtacttttcagatcgccctgaggacaacctactggacaatgataaaccatgttgtcatctggggtagcctgggtttctacttttgggtgtcattcctcctgtacagcgatggcttgtgyctagtattccctgacgtcttccaattcctaggtaaggccctgcccagtgggcggagggtggggaaccaggtatatttatttaataaatgtttaccgagaagccattactatgtgctaggctagagatataaataagacatggtctctgccctaaaagggctcaaaatgtagctagggaaataagttaccttayttgagtttccaaggtattttcaaatgtcttacgagatttgctatttatcagcatcctaagaggtaggcagtgcaacaatttttagagccattttagacaccggagggtttttttttaattaaaggacttaaatctaggtttcctggttccagttcaatgtcctttatgctgtggcatatcgccttgttgtctcccataatttttccctctctctcatctccactttgctgaagacaaaatatagagagtagatatgtagatgtagttggctcccatctttttgtttttatttttaattttttgagactctgttgctctacctctgtcgccttggctggagtgcagtggtgcaatcttggctcactgcaacctctgcctcctgggtttaagcgattctcgtgcctcagcctccccactagctgggactacagttgtgcaccaccatgcactgctcatttttttgtatttttggtagagacgtgtttttgccatgttggccagggtggcctcaaactcccggcctcaagcaatctgccggcctggggctcccaaagtgctgggattacaagcgtgagccaccgcacctggctgtctctcaccttttgtcaggccactaacttatttttctccttcaaatctttttttttctttttttaattttttttttttaccttttttatttttatttttttgttttttcctcctccaaagctttctttcccatttttggatgcaagccagtgctctaggattccctcataacttacccctgctctcctatcctgccctaccctgccctgcctttagagggagagagaggcacatggattcacagtgactttggctgcacaaaggacccaactacaattcttttgtatttatattatttctcaggagcctaaactaactacaagtcagtaacttccttctttggactagagaggtgtctacgttctggctggtaactcctacccctggtcctacccsggtcctccaggctctgtttcagcctttcccctcctggctcactgtttacaggtgtggtcaggaattctctgaaccagccgcaaatgctgctgagcattatcctcagtgtggtcctctgtatgttgcctgtgattgggcaccaatttcttaaaccactattctggcctatcagcatggacaaagtaagtgcaacagaaaatctacgcagatataattcatgaccttcttttgcttttgcctctgtggatgaaaaccctatcccccatgctctggctataggtttttgacagaattcaagagtgcaggagacttccacagcagtccccagtcyggaccaaactgaaacactcaagcactcgacgttctgcctatgcattctcccataaacaaggctttggggccctyatcacttctggcaagatagtgaagcccaggatgtccaagagaaacaccctttttttgaaaaagatagaggccctagggaaattccaaaggaggcagtcagtgctcttcctccctcgtactcatgcaacttaggaagaattagagtccctgggaaaccagcataaacctgctccttcattctcactagggactaagcctcttaattgtccagaaggctattcccagaaaggcaaggaggggtaaggaaagagcccccagatatctgccagagttgcagcatttcaagaaaaagaaaaaaaaagcaacctcaggcctgcctcccaccatctcttgcaagttttaatccagacaagcatatgtagaggtagggggtgacaagagacagtatggggaagggaaaagaagatggaacctaagaattttactttgggccctatctcctatactcagagcaagcataaaccttcccagggccctacacaaacatattcccatcgaggcatcacataaaataaaatcaaccatttaaaaaggtataatttagtgacaattacttcccatttataagcaagggatgcatgagtgctacccatagaccggatatgggccatgtckttagcgtttcttgatctcgttagataaattatctgaaattttgaggagacttcagcagaaagaagcaggggatatgctgtcaaatgcctgtggatttatactaagaaagaaagaaggggcataaggaaaattttctttatctcgattttggaggtggttacatgggtatgtatttgtcaaaattcattgacctgtatacttaagatttatacattttattttatgtaaactatatctcaataaagttgagttttttaatgtctagaaatttttaatggagttgtaagtgaccaaccacaggagccagattcacccacactgaagtaactcactatagaagagatatctccaccaatggggagagaatttctgaagaacctataaaaggacctcttgaaaacgagtcaactttagatacctgccaggcctttttttttttttttttttttttttttgagatggagtctcactctgtcgcccaggctggagtgcagtagcgctatttcggttcactgcaacctctgcctcccaggttccaacaattctgcctcagcctcccgagtagctgggattacaggtgcacaccaccacacccggctaatttttgtatctttagtagagacgggtttttgccatgttagccaggctggtctcaaactcctggtctcaactgatctacccgcctcagcctcccaaagtgctgggattacaggcatgagccaccatgcctaacttatctgccaagccttaaaattagtttatgactgtattagtcaagtaaaggctttcttcatctcttccctctcctgtcctgcttaagccccggagaaaaaagaattagcaagctgaaggagggaggaggggtaagtagaaaaacagacatctacaaagcccactgaacctggccacatgcagcagcccagctgaaagataaggaaaagcattaattgtaaaggttgaagtttttaaaaattatttcattaaatcactttaactactaaagcgaaacttaaagtgacaagtactggttgctactaaaaaggaccattcactaagtacattttgcatcagcacttgttccttcaccttgtacttttatgttatagagacgacttctttctgtaaacctcatgaacccacctctgttggcatccaacttttcttctgtaacttcttccccagccttcatagaattgaagagagttagggccttgctctggattaggttttggcttaagggaatactgtggctggtttcagcttctatacagaccactcaaactttctctgtatctgcaataaggctgttttgctttcttatttgtgtgttcactggaatagcacttttaatttccttcaataacttttcctttgcattcacaacttggctaactggtataagaggcctagctttcagcctgtcttggctttcgacatgccttcctcaataatcttaatcgtttctagctttttatttcaagtgacagatatgtgactcttcctttcacttgaacacttagaggccatttagggttattaattggcctgatttcaatattgttgtgtctcagggaatagggaggcctgaggagaggtaaagatgggaatgacgggttggtggagcagtcagaacaggcatttattaagtttggcatcttctataggcgcagttcgtggtgccccaaagaaatgaacaaggaacactgtcctagccccaacatatccctgtgattccagctccaaattatctaccaaatcttctaagattcatgaaaagcgttttggaaaagacacatcatttggaggatcctgggagtcattcaagactatttgctgtatgttaccccacccacccccatgacacattcaattaatcactaaattctacagatttctataccctaaatcatccttgaatctatctcctcttatctaagccttcagccactgccctaattcagactctttcagttctcatcataattatcaatctcctaactggttgattgattaccttcctgtaattcaatatccacactcctactgaagtgagatttctaaagctcagatatgttcacatcactcccctgcatgaaataatagtgccaacagccttcagaataaaatccaaacttagctgggcatggtggctcatgcctgtaatcccagcactttgggaggctgaggcgggtagatcacctgaggtcagaagtacaaaaccagcctggccaacatggtgaaactgggcgtggtggcgggctcctgtaatcccagctactcgggaggctgaggcaggagaatcacttgaacccaggaggcagaggttgcagtgagccgagatcacaccactgcattccacctggggtgacagagcaagactccatctcaagaaaataaaatccaaactcccaaacacacatacaaggcccttcctaatcttgctgttgcctccctcctacactttgcccatgcttaactaatgcccatactacttgagtttccctaaggcatcatgctttctttgtttttttttttttttttgagacagagtttcactcttgttgcccaggctggagtgcaatggtgtgatctcggctcactgcaacctccacctcccaggttcaagcagttctcctgcctcagagaggcaagtagctgggattacaggcatgtgccaccatgcctggctaattttgtatttttagtagaggtgggcttttcaccatgttggtcaggctggtttcgaactcctgacctcaggtgatccacccacctttgcctcccaaagttctgggattacaggcatgacccaccgtgcccagcctctttgtttgtttgtttttgagatggagttacgctcttgttacccaggctggagtgcaatggtgcaatctgagctcactgcaacctccacctcccgggttcaagcgattctcctgcctcaacctcctgagtagctgggattacaggcacctgccagcatgcccaactaatttttgtatttttagtagagacggggtttcaccatgttggccaggctgatcttgaactcctgatctgaggtgatgtgcctgccttggcctcccaaagtgctgggattacaggtgtgagacaccgcacccggccagcatcatgctttcttatgtctctgtgttttcgtatattctttgatttgcaagtgtctggaaaacttaagaaatactttgaaatgggtgtctttttaatggaatgttgggtgctgttaagaatctttgggaattatttgattatattagcggtgagagcctttgatttcctttgactaggttcctattttacaagtaagctattttctaactcgttggagttagaagttaacttcagaatactgacaataaataatacaaaagattttctgcccataacagtgcaaacgattcctgttctgggtgatgcaaataaattttgtccattagagaaaagacatttctaagtcaaatcttcatttgaactggttttagtatcttactggttccctcattagttaaataaaaaatttgaaatatgttcattgtatatttgtataaggctctgccaggctcagtggctcatgtctgtaatcccagcactttaagaggtggaggcgggtggattgcttgagctcaggagttcaagaccagcctgggtaacatggcaaaaccctgtctctaccaaaaatgcaaaaaatatctttagtcccagctactctggaggctgaggtgggaggatcgctgaagcccggaagtcgaggctgcagtgagccatgatcgcaccactgcactccagcctgggtaacagagaacctgtctcaaaaaataaaaaataaaaatacttgcataaggctcattattttacctttttgaaagttattctttaacacaaacaacaggaagtaacccacactcgctgaagccaaaaatgagattcctatgaatggatagaaggatgcatcatgatcctggggaaggaatcctgctgggcctcagaaagaagtggaaccagctgctggaaggtcccaagaacctagggagcagtctttttgtgtctagacttgcttctctgtgtgcaactgattgatcttctttctcagcaaactggttttcaatgctgctcaggccaaatgggcaagtagaagatgactactgcatagctcccaaattacccttaagtccaatttaagtctgagcagagatgtagctctttgtctcccaattccaaattcttagagaagtaattctaattggcctggtttggcttaattccccaacccagactatttaactgggggatcacactgtgcaaacatgcaattcctcattggttccccactggcaatgctagctctctccatgtcacccttatttaagcccttagaactttatttctaacattcatatttgatcttgtcattcctgcctctgcaataaagcccttcagtatctctcccaactccttagtagtcataggcgtttcatcaccaaaccctgaccagctctcctcagctgtctccgttgcctcccacacttctcaatcacattggtcattttgcccctcagttcttttgcacatgccaattctctctttacctcccactcattcttcaaaattcagctcacaccacttctgtgaagcctgaagacaagctacatatcctgacatttatctgcttccttgactgtgaccccagtctctaactctttcagtgagtatggaacctagaacagagtcttctatttttttttttgagacagagtcttgctctgttgcccaggctggagtgcaatggcgcaatctcagctcactgcaacctccgcctcccaggttcaagtgattctccttcctcagcctcccgagtagctgggattacaggcatgcgccaccacacccggctgatttttgtattttgagtagagacggggttttaccatgctagtggtctcaaactcctgacctcaggtgatccgcccgcctcagcctcccaaagtgctgggattacaggcgtgagccaccgcgtctagcctaagagtcttctcaatgggtgatatggttttgttagtggtggaagaggtctgagttaccccaagttacctgcagcctatccttatgggtctgtagcaactttagtccttgcttcatcagaagaaagaattcgactgtggggcagaaagcagaaaaagagaccaaggcaagttccagagtaggaatggaagtttatttaaaaaggccttagaacaggaaagaaaggaaggtgcgcttggaagaaacccaagcgggcacgtgaaggttaaagagagaaggtcaagtgcctaaccaagatcctaggacttttacaggctggcctctttcccatgattcttcccttagagtgggcttcccgaatgcgcagtgctttccttcccgttttccggtggagggtgcccccaggagatcatacgtcaccatttttgtctcttaacacgcatgcccagaaagttgcttctccctgaggcctgcattcaattagcattttgatgttaacatgtgtggaccatcaggaaatggcctctccctggcccagccgaattatcctttttaaagaagcaatgaggtaattatggaactgtcactggtagagggtctgactgcaagttgtccaggttcttggcgttttgaacaaagaattggacaaaacgcccagcaaagcaaagaaagaatgaaggaacaaaagaaggaaagcagggatgtattgaaaacgaaagcacactccacagtgtgggagcagccggagcagcggctcaagggccaggaaacagaatcttcttgggtccaaataccccctagaagttacccgccacttcatgctcacctcatgtaaatgaattcgtagcctgcaatcagtctgattggttgcagaaagcagccaagcagaggctgaagtgaagttacaaaggtcgcacacctgtgcaaacatctgattggttgcaagaagcaaccaatcagaggctagggtgaagttacaaagttatacttctatgcaaagttagactcggctgcagtcagtctaattggttgcagatagccaatttcccatctgctgggcagaaaagttgggtggggggtttgttacttaggtgtggaaagttagggttttcctttcaatttagttccaggaagttggcatgaaccagtcttaggttccctgcctccagtccctattctcctgcctcagaaccatcacccaacatccctagtgggtagcagggg

SEQ ID NO: 93975 - DNA, 12751 bp, Homo sapiens
atcttttcagaggatatgaaggtacatgtaatttttcattcaattgctgagtttgactattataataggatatcacctataagtagtgaggcctaagaccaaagatctagatacaaagaataataattagtatattaatataccttgtttgtatttcctacaagatattaagtggtaaatttattagcttaagaaaaacacttcattgtattataattgtcaaggagtgaaaatctttgctaaaagcattggcaaagttatgctttgtaaaatcatttatgtatgaaatgtaaacatacatcatatcccaataggcataggccttttaggaaatcctaagtgatcaaggacaaaaaatatttatttatttatttatttatttatttatttatttactttcttagagatggggtcttgctttgttgcccaggctggagtgtagtggtacaatcacagctcactgcagccttgacctcccaggttcaagcaatcctcccacctcagtatcctaagtagctgggactacaggcaagcacaagcatacctggctaattaaaaaaaaaaaaaaagaattgtagatattaggtctcactatgttggctaggctggtctcaaattcctgggtttaagtaattctcctgacttggccttttaaagtgctgggattccaggtgtgagccactgcatctggccaaaagtcatttaattttacaatagatgtattaacaagattcaagtatgagttaattattcatcccagtttcagatgttatcctcgtaaacaaaaattttctcagcacttattgactatattttgaaggaaaaggaagataatgaaagcttttagtcctgcaaagagcaatttcagtcaatgaatttaatagcgtaaattatttttactatcgtctttgatggtatacggaaaaaagttaatagatcctctcttttcacatctggaacttataaatcaatcctcgttagtagcgtgctttctccatgcttgatgataactcatagcagctgggggttggtattaatctcttcctaattagagaagcagatgccacaaattcatcattctacatgagagcaaaggtgttaaatccattcctctgattcttctcatcttattctccataaagcaatccataataactttactgttcatcatacgaagtgagggctgatagaagattgagattttgaggtggagagctggatttgaatccagcctctaactggctgtgtgatcctagtcatgcaacttaatctctctgagccttagattattagtctgcacacagtcattctagttacctcacaagacagtagttatgattaaatgatgtaattcatgggaaaagcatcacgcaaataccttttgaaaaaaacttttaattattgaaaatttcaattcttaggtcaagagaaaattatgttgtaccgtcatgtgcccatcacccagcctcaacaatcatccattcatggccaatcctgttagatctatactccacccagtttcccttcctttctcaaaaggaatataaaacaaattccagacatcatgtcatttccctgcttaaatattttagtatgtgtttctaaaaggtaaagttttttttaggcataactataaaaccattatcacactttaaaaattcaacaaatatccagtaagtgtctatttccctaattgtctcacaaaattttttaaataattatttacttccagcctggaaacatgtgagacccagtcgctacagttttttttttgttttttttttttttccaattcaccacagttgaggcactctggctcatgcctataatccaagcaccttgggaggccaaggcaggaagatcgcttgagctcaggagtttgaaaccagcctgggcaatacagtgagacctcatctctactaaaacaatttaaaaaaaaattagccaagggtcatggcatgcacctgtagtcccagctgcttaggagactgaggtgggagaattgcttgagcccaggaggttgaggctgcagtgagctgtgatcgcgccactgcactccagcctgggtgagagagcaagatcctgtctcaaaaataaataaataaataaataaaaattatctgggcatggtggtgtgttcccatagtcccagctactctggaggctgtggcaggaggatcacttgagcctaggagttgaggctgcagtgagctatgattatgccactgcattccagcctggacaacagagcgagaccctacctcaaaaaaacaaaagagaaaaattattttgtttgtctcaggatttaaataaggtctacatgtagcttttggcctattttgtctttttagtctaatttaatctgtaactgcactgtccaacattgtagccactagccacatgtaatgatttaaattcaagcattaattaaaattaaatcaaattagaaattccatttctcagttgcagtagccatgtttctagtgccaaatagccacatggatagtacagatacagaacatctctatcattgcagaaagcactgtaggacagtgctactctacaagtctctcccttcctctattttattcccttcaatttaattgttgaaaaaaccaagtcatttgtcttacaaagtttcccacattctggattttactgattgattcctgtggtgtcattaaatatgttcttctgccccatgcattttctataaactggtggttagagttagagactaaaaagcttcaccctttttgtgatctcaagttcaaccatgtgatcttgagtgtgtaacttggagtatcagttctctcatatgtaaaatgggaataatagcatacctatttgttgtaaaaactaaatgatataattgatacaagtgcttagctttgcacatagattcagtatatattagttatcatttgcatcattataattgttatcaggcagtgattctcaaatcccagtccaatgatattttctggatacataaaaaattaagttttctggagactctaattcagtaggtttgtggcccccccaaaatctacctaccaggtgaagtagcatgagttgtagctactcaggaggctgaggcaggaggatggcttgaacctaggagttgaaagcctgcttgggtaacacagagagactctgcctcttaaaaaaagaattcttagataattctaatgcatttgtgggtttggaaattgatggctttgcgatgtataaacttgactaggctgaactacagtccccagaagtccatttctagtatatttcccatttgagtgaatggcaacagatctcttgcaagagttggaagatgaaagggaggcagcagatgttttgtattatagtatatacattctttcagttattcaatcaaacataatctgagtgttatcatgaagggattttgcagttgtagttaaagtccctaattagttgactttaagttgataaaagggagattatccagggtggccctgatttaatcagttagaaggcctttaaaatagggcttttcccaggccagggcttactagtgaactctgtcaaatgtttaaagaagaaccaattcttcacaaattcttccaaaatgtaaaagaggagaaaacacttcccaaattattctataaggcctgatgccaaaatcaaagacaacacaagaaaaaaacaagactattatgtgttttgaatataaatgcaacagttctcaataaaatattagcaaactggatccagcagcataataaaaaaaggattatacaccaagaccaagtaaaatgtatcccaggaatgcaaggttggtttaacacctgaaatcaattaatgtaatacactatatagtagaataagggacaaacccacatgatcatttcaatagatgacgaaaaagtatttgacaaaattcagcaactcttcataataaaagaaatcaacaaacaagaaatagaaggaaacttcctcaacctaataaaaagcatttatgaaaaaccatgccaggtgcggtggctcatgcctgtaatcccagcactttggggaggctgaggcgggcagatcatgaggtaagagatcgagaccatcctggccaacatggtgaaaccccatctctactaaaaaaaaacaaaaattagctgggcatggtggtgcacacctgtagtctcagctacttggcaggctgaggcaggagaattgcttgaacttgggatgcagaggttgcagtgagctgagatcgtgccactgcactctagcctggtgacagagtgagactcagtctaaaaaaaaaaaagaaaagaaaaaccaacagctaacagcatacttagtggtaaaaggttgaatgttttcttcctaagattaggaacaagacaagaatgtcttgtctcaccacttctaatcaacattttactggaggttatatctagggcaattggacaagaacattaaataaaaggcatccagactgaatagaaacgagtaaaaattggccaggcattgtggctcatacctgtaatcccagcactttgggaggttgaggcaggcggatcacctgaggtcaggagttcaagaccagcctggccaacatagagaaatcctgtctctactaaaaatacaaaaattagctgggcatggtggtgtgtgcctgtattcccagctacttgggaggctgaggcaggagaatcgcttgagcctgggaggtggaggttgcagtgagctgagatcgtgcttttgcactccagtctgggcgacaagagcgagactccttctcaaaaaacaaacaaacaaacaaaaaacctctagctgcctttgttacagaaattaacaaactagtcctaaaacttatatgaaaaggtaagggacccagaataataaaaacaatctttaaaaagaacaaagttggggaacttacacttcctgattgcaaaacttactacaaagctgaagtaataaagattgtagtgctgacagaagacagatatatacatcaatggaatagaattgagagtccagaagtaaaccctcttacatttatggtcaactgattttcaataagggtgccaagataattaacgagggaaagaatactctttccaacacgtgtgattgagacaactggatattcacatataaaagaatgaagttaaaccttcaatctcacattgtacacaaaagttatttctaaggggattatggatctaaatataaaagctaaacctataaaacacatagaagaaaacataggagtaaatcttcttgatctaggattaaggaatgatttgttaaatacaacactaacaaccaaagtgacaaaagaagaatgtacctatataaattggacttcaccaaaatttaacatgtttgtgcttcaaagaatatcatccagatagtgaaaagacagcttactaaatgggagaaaatatttgcaaattatgtggttgataagggacttgtatttacaatatataaataactcttacaattcgacaataaaaggacaaccccacttacaaaatgaacaaaggatttgaaaagacattttccaaaaaagagatatgaatggccagttagcacatgaaaacgtattcaacatcattagtcattagggaaatgcaaatcaaaaccacaatgagataccatttcacatccattaggatggctaaaaaaatttgtttaaatatacagtaacaagcccggcatggtggcttacacctgtaatcctagcactttgggaggctgaggcgggcagatcacttgaggtcaagagttcgagaccagcctcgccaatatggtgaaacccgtttctactaaaaatatttaaaaaattagccaggcgtggtggcaatcacctgtaatctcagttactcgggaggctgagacaggagaattgcttgaactcaagaggcagaggttgcagtgagccaagattgagccactacaccccagcctgggtaacacagggagactccatctcaaaaataaaataaaataaaataaacaggaggaaggagcagcaccaaatccaagatggcggccagcaggaggctgatgaaggagcttgaagaaatccgcaaatgtgggatgaaaaacttcygtaacatccaggttgatgaagctaatttattgacttggcaagggcttattgttcctgacaaccctccatatgataagggggccttcagaatagaaatcaactttccagcagagtacccattcaaaccaccgaagatcacatttaaaacaaagatctatcacccaaacatcgacgaaaaggggcaggtctgtctgccagtaattagtgctgaaaactggaagccagcaaccaaaaccgaccaagtaatccagtccctcatagcactggtgaatgacccccagcccaagcacccgcttcgggctgacctagctgaagaatactctaaggaccgtaaaaaattctgtaagaatgctgaagagtttacaaagaaatatggggaaaagcgacctgtggactaaaatctgccacgattggttccagcaagtgtgagcagagaccccgtgcagtgcattcagacaccccgcaaagcaggactctgtggaaattgacacgtgccaccgcctggcgttcgcttgtggcagttactaactttctacagttttcttaatcaaaagtggtctaggtaacctgtaaagaaaggattaaaaatttaagatgttctagttctgctctctttgttttaaaaatcactgcttcaatctacttcaaaagaaaaaaaaaacaataaaaagtgttgatgaagatgtgaagaaactggaatccttattagttgctggtgggaatgtaaaatagtgttgctactttggaaaacagattggcacttcctcaaaaattaaacatagagttaccatatgacccagcaattccactcctcggtatacacccaagagacatgaaaatgtatgtccacacaaaaacctttacacaaaagttcagagcagcattatttataacagtccagaagtgaaaacaactcaaatatctatcaaatgatgaataaataccattttaaatgtgatatatttacacaatagaatattcaacaatgaaaaggaatgaagcactgatacatgctacatcatagatgaaccttgaaaacattttgctaagtaaaagaagtcagatgcaaaagaccacatgttctatgagtccatttatatgagttgtccagaacaggcaaatctacagagacagaaagtagttgtctatggccggaggtgtgggggttggaggatgctgataggaaatggggactatatgctaatggatataggattttttcctggggtgatgaaaatgttctaaaattgattgtcatgatggttgcacaacttttgtaatagactgcaatcaactgaatactttaaataggtgcattgtatgatatgtgaattatatcctaataaagccattatttaaaaagcagggagggaagggttacatctcccctgaactcagagactccaaacagcagctgggcttgcaattgcactcccttcctcctggatcttccttcctgactgcctgcgcacaacaggctttagcccgttcccatagggttccagcttgcttatgatcttcccttgctgactgcgtgctctgtggatttcaggcttgcttagccagccccacaattgtgtaagccaattccttgtaacaaacaaacttgttctgcttactggttgaaacctgttatggaaaccagtgttcaagagtttctctaaatatttatctcaagaacctggggtaggtatctggttgaggatttaggggtcatggattctgccaaatatcaaagcaccactcacttttagaatgattgttgacgaggctttggtcagagggaatagcagtagttgggattggaagagcagcctctagtgaaatcatattgattcttcctccaaggcgaagagctcgctctcttcttgaccatgagcttaatttttaagctcaatgggtaaagcgaataaaaagctgagtattttggggggccagagaacatttattgactaacttgatgtttcccctgctgtggagaatcatgcattattttaacacccttggttctatgcatgctctcactcctctcacacaccgtaattgattaatgagtttggagaagatagcgggcaggcatagcctagccacatcctttctttctttctctgggaactgagctttctgcagggagcccacactttcctttgtgcttccattctataaattttacttatacagtaagtcctcccataacattgttgataagttcttggaaactgactttaagcaaaatgatacatgaaaccagttttaccatgggctaatagatataacaggagttaagtttcttggcatatttctatcacaaaacatcactaaacttctaaataaagacccaaaacacttctaacattaaacattaaaataaatgtgaggttaccatatattaaagaaagattaataaagacaagcaaggtaattatttacccaatttttgatgaatcagtgagtgatggcagtcattgtggtggaggtgaaatctaggaataaatgtttacaaagtggaaattttacggagcacctactaccgccacaaagttcaaaaacattaggccaggcaccgtggctcatgacagtaaccccagcactttgggaggctgaggcgggtggatcgcctgaggccaggagttagaggccagcctggctaacatggagaaatctcgtcctactaaaaatacaaaaattagccaggtgtggtggcacgcacctgtaatcccagctactcgagtggctgaggcatgagaatcgcccgaacccaggaggcagaggttgcagtgagctgagatcgccctactgtactccagcctgcctcaaaataagtaaataaataacagacatggtgggcttgccaagtgcttttatatggcattattgtcaggaatttgtatgattgcatgacaatcatacaaatttgcagactttacagatttttacttgacaatgatttgtattattcattaattccttttccaaccgtcttattccagttcagggtaatgagtggctggaacctctcccggtagctcagggcaccaggcagaaacccaccctggccaggatgccatccaatcgcagggcgcgcttacacacacccaaactcactgagattgggaccatgtagcacgccaatgaactttacactcacatctttgcgatgcaggagaaaacccatgcaggtgtggggagaacatacaaactccacacagagagtggccccactaggaattgattttttttcataatcaactttacaacaaaatgatattgaatgaaaggacattattcaaggacctgctgtacttgactccatgggaagagggctgggttaggccagaaatatctgaacctacacaggcaagacagtcttgtaagtgtgaagttgttttaagaagtcgatctgcctacaggtaaatgtcatattatctgttcaagtctttattaataataaagatgatatgtggcctccattcaatccctaatgtcttagactttattttttttgcagggggttggggggatggcaggacagagtcttgcagctagagtgcggtggtgtgaccatagctaacggcaacctcaaactcctgggctcaagtgatcctcctgcctcagcctcccaagtagctgggactacaggtgcacaccaccatgcctggctaatttttaaattagtaaatttttggtactgacagggtctcactaggtttcccaggttggtcttgagctcttggcctcaagcgatccttccacctcagcctcccaaagtgttgagattataggcatgaaacactgcatccaggctatattttatctcatactttatcgtttgattcagaatttgaaaggcatggtagttattggccccctcaaagacttcagcatgggacaggagaagcagcaatttacaaaaaagttttggacatgtgcaatagtaatggctaaagtaataattacattcttagacttttttaagagtcagaagggatcctggagataatctagcagctagattctaactcatagaggttaagtaatgtgtccaaagctacccagccttctagtgacatatcagaactacaatccaaattttcttttggcccactgcacttttcaccatgccctgctgcttccttaatatgctgagatgtttaaaatatcacattctgctattttgttctcattttatctgtttccctgagtatcagacttttgtcattgttataaacaaagaaataaatgcacttcaggttaaataagtttcccatggcaataggacttatcagaggtagcgctggaagtgaaatatagtactctaattttagtccaaggttgtactcatgagatttattttttctgtcaaaatgccaaattgaaataaatagaagagttgggcaccatggaagtagagttgctgtggtggaggctgtggttcatatattaattcagccaacgatctctggttccttttctgccatgaagtcacagtatgttgtgggattaaaatttcctccaaaagaatagaaggaaataagtagaatggggtgtcactgcctaactcccaaagcctgtgatcttaattaactctgacgttgactgccttctcagatctgtaaggtgcaaaggtaaactttcagacagtacaataaaagtttaagcgaatttctagaagcagttaatttatacattattcatcaaagtaatattaatttagcacttgtatagtataggtttctttaaataaccgtccctgcagttttattgctggaaatgcattaatgtgaaagatacacattaggctgcaattaggacagcatggagaattactttacagactggcaatctgttaatgaagccattactccgagtttctacaaaacctacaactgaatttcatttgatttctgaccaacggtctttaatcttacctgctttccatgttgagaattaaatcattcattcattcacaaaatagcttttaagctgctgtgaatctggcactgttttaggcattgggaatagggtaataagtagaacaaagtttctgacctcattgaacagaatgtgttacaaaataataagcataatagaaccctttttttgctgctgttaaagataggcatacatcctgtttaataaagatattacacttgtgtccttaaaaaagaaaaaactatggtcaaataaatttgagaaataatgcaattatagtccctttttaatgcttcaaaatacacactagcttattaaagaccttaagatattacacaataaaggaatctgtttgacttctttgactacttaaacttaatgtttctcttttggaatagttcttcttcttcttcttcttcttcttcttcttcttctttcttcttcttcttctggaatagtgcttcttcttcttcttcttcctcttcttcttcttcttttggaatagtgcttcttcttcctcctcttcttcttcttcctcttcttcttcttgctcttcttcttcttctggaatagtgcttcttcttcctcttcttcttcttcttttggaatagtgcttcttcttcctcttcttcttcttcctcttcttcttttggaatagttcttcctcttcttcttcttcttcctcttcctcttcctcttcctcttcctcttccttcttcttcttcttcttcttcttcttcttcttcttcttcttcttttctcttttttcgagacagagtctcgctctgtcacccaggctggagtgcagtggtgcgatctcagcccactggaacttctgcctcccaggttcaagcaattctctgccacagccttccgagtagctgggactacagatgcccgccaccacgcccagctagtttttgtatgtttagtagagacagggtttcaccgtgttggccaggctggtcttgaactcctgacctcgtgatccacctgcctcggactcccaaagtgctgggattagaggtgtgagctactatgcctggccggaatagtgcttcttaacctcctgtgaatgaatgtttcaagaagtcatttttagaaaatactaagctgtaagaactcattattatacacgagataaggagctaatatccaaaatatacacagaccccagactattcgataacaagaaatcaagtaaccctattaaaaatgggcaaaggacttgaatagttacttctcaaaagaagacatacaaatggccaatagatatatgagaagatgtttaacatctctaattatcagagcaatgcaaatgaaaactacaatgagatgtcacctcacacctgttagactgtatattatcgaaaagatgaaagatagcaagtgttggtgaggatgcgcagtaaaaggaaacttgtacactgtcggtaggaatgtaaattactacagccattttggaaaacagtatagaggttcctcaaaaaactaaaaatataattaccacaaaatccagcaatcccactatggggtgtgtgcacaaaaggaatgaaatcagtatgctgaaagaatatctatactcccacgtccattgcagcagtatgcatgttagccaaggtatagaaacaatctaaatgttcatcaacagatgaatgggtttttaaaatttgatgtatatacacaatggagtactattcagcctttaaaaaaatagggaat

SEQ ID NO: 93976 - DNA, 12901 bp, Homo sapiens
cggggaggagggagaggtgggtcgggaaggagggggaagtgggagaccggggatgtgggaggggagagaaggaggaggtgggagaggggaaagcggggaaaggggaaggtggggcgggcggaggtgggggtagaaagtggggaagagcggggatggcaagtgccgcgggtgggcgagcggccccagggagcggcgggggggcgaagcaagttccttagtttctcccaagccagcccgggagctgttggacgagtgggagcgcctggctacctgcaagtcttcgggtttcgcgagcgccgcagagcttttctgcagccgctaaataaataaataactacggacgcccgccccgccccgccccgccccgcccctcccagcccagcccagcccagcccagcccagcccagccccgcccagcgcagctccctggccgcggcggcggtggtggcagcggtggtggcggctgcggcgcaggcagggctgggcgcttggggagctccgcgcgcggggcacttccccgtgaccggcggccgcgcagctcagggaactccgctccgtgaggcttccgggagagggaaagctgttctcctttgatgctctttggttttacagtggaaaactacaattaaaaaaacatagccgtgaaaataaatgagattagaacctgctggcttcacttcctggaggctttttgttgtgtcttgaaactaggatctttgcgggtcatccctgtaagtgcctttttaatccattcacaaggatgcttgtgagtctctgctgcgtttaacatcggtcagcgggtgacattgcattaatttgctctggtgatgatttctgctttgctaggttagcattgcctcgcttggtgacacgtaataaatgcacacacgttgcaaaaattaggacacagagggagaggcacctttttaactctgtcaaaaaatagataagaaaatctcttctaaagcggtgccaatatcgggaaaatggtttattatttagactgtggagatattaaaaaccacaacaaaacctaattaattattccatagccattctacataaagtaacatgataaaatcattaaataatagcaatgacaaaactcagtttgttgttctaaacttactgctttagaatgttgtttatcatgtcatgtatagtaaatcacatatctagtttttgtgcatgtgtgtcagagagagacagacagacatggataacttctgctctgaaacacagcaggtttaaggcttctatacagagaagttccatctggaaaatctccaaatacaattacaataaagcagatacaatatggagtgttattaaactggaggttcttcccccggagagtttactctattttcctttaaaataaactagggccgggtgtggtggctcaacgcctgtaatcccagcactttgggaggctgaggcaggaggatcatttgagtccaggagttcaagagcagcctgggcaacatagtgaaactccatctctaaaaaaatacagtattagctgggtgtggtggtgcacacctgtagttccagctattagggaggctgagacaggaggatggcatgagcctgggaagtgaaggttgtagtgagccaagatagcaccactgcactacagccagaccttgtctcaaaaaaataaaataaactgaaaggccggggaatcatatatttaaaattggccagtgctcattaaagatcactcaaaaaccagaatgaggcatccttacggtgggaaggtagggtaatagaaagatgcaattccagttcacaaaaatttggccttcaggccacatctgatacacttgcataaaattgaaagacgatgcaatgcatgttttcctaaattaaaccagaaatagtggtagggatataccttcatgccagcagatgcacagacaggttctgatggaaaccgttttcactaaaccatgtcccagttactttatgtagcttaacgccctgggatttgtatgttcccaaccagagggtgcatgctggagctccatgggcctgaacttgtcttccagacctgtttggcctgcggggtgtagtttaaacttttgaattagttatggatattttgaaattgttaagtttcacatggaaagctggactttgggcttctctgaaacatgagaagcccgggccaccctgggtgggactgttggctggagccaacagcagtgttaggtgtgagggtgacagtctgtacctctccagctgtcttcccccacctctgccttcactctgttaagggacttgtccactctgcacatgtgaattttctaaaaattagtcctggttcagacaaaccactgcacccagtgcttggtcaacgtattaggattattaaagtcacagatgactttgacactctaggatctagaattatgtaatgttaaaacctcaaatctcaatttctggagattcctttaggcagattcaaccaaccagaggctgactgtacatttcctgaaggcaggcacaacatgatgtcctagtttcctggattctgcgttcccctaaggtgccgtgagatgtaggagagtgtgtggtctctgaaattaagctcaggaatttggatccccaatagttacttgccattcagtgtaaagcaagttatatactatccctgagcttgtttcctcaaacacagatagttataaccaaactacctctgtggattattgcatattaaattactatatatatgtctgctcagagtttacagcaaatttaaaactaaataaataaaattactatatgtgaaagcatcttgaacagtacctggcccacagtgaccacccaaaatagttgtttctcttgctcttgggatttcagtttctgagtgcagtcaatcatagctcactgcagcctcgacctcctgggctcagtgatcttcccggtccagcctcctgagcagctaggattacaggtgtgtactaccatgcccacctaatttttaatgttttatttgtagacaccaggtctgtgttgcccaggctggtcttgaactcctggcctcaagcaatccccctacctcagcctcccaaagtgctaggattacaggcatgagccacagtgcccagttcttggatacctgctttacattccagtttctgttctctccctcaggattttgattcaagaggtcccaatggggcctgagggttaacattttaacatttaatcctcagggaggagttctagaccacactctgacagtgcccatcctggattggccacagttgttcaagtagatgagacagagaacaaagaaataggccctggttgattccctggctggtcctggccagcatgctgatcctgcagctccattggatgcactgcctgggtcccaattgtctacttatcacttcatgggcatttattgagcacctactagaaacacagtgaggcaggcacttggcattcaaaggtaggtgaagtggttcctgttcgcagggagattgggaatggaatacaaagcccagggcctggcattgggctccagttcctgcctttcctaccactcaccattcaataccatctctaatgccttcttcccaaagacagtcgctcctccccacccagcgccatgcattctcatgccatattactgagtcttggataatagttacttttgcattacatgcagacacttaccatagtaccgtttaggtgttcatcacatacttgtgggacttaatttccttggacaaatctgtcttccgaaacttcagcttatgtttattcactcatcaaatatttataggccgggcgtggtgtttcacgcctgtaatcccagcactttgggagtccaaggcaggcagatcacctgaggtcaggattttaagaccagcctggccaacatggtgaaaccccgtcactgctaaaaataacaaaaatttgccgggcgtgcctgtaatcccagctactcgggaggccgaggcaggagaatcgcttgaacctgggaggcggatgttgcagtgagccaagattgggccattgcactccagcctgggtgataagaatgaaactccatctcaaaaaaagaaaaaaggccaggcacagtggctcacgcttgtaatcccagcactttgggaggccaaggcaggtggatcaactgaggtcaggagtttgagaccagcctggccaacacggcgaaaccccatctctactaaaaatacaaaaattagccaggcgtggtggtgggtgcctgtaatcccaattactcgggaggctaaggcaggagaatcgcttgaaactgggaggcggaggttgcagtgagctgagatcacaccactgaactctagcttgggagacaagagtgaaactcctcctcaaaaaaaacaaaaaagaaaaagtatggatgcgagtcggggcttacacaaaagtgaggggtcaggagggggaatgtatggagcacctcctataagtcagacagtggcccagaagctggggatacagcaacggacaaaattacaatccctgcccacatggaggttttagttggggaagacaggtcatataaacatactattttgaatcgtacttgttcaattgtattttgtaccctgacatctgctgcaatcttatttgctctctgaatcctaccttattttcctgccagatggacttctttcctagtcctggtctacacagcctatgctcaggtggtgattttattatctatagctagagagctctctgtgtatactgttacattttgattcaaaatgtctgtgtttcttccaggctttgatcaaaatcaaccattcctttccaaaattcagaagcttccacaacaaggtaacttttaaaaatgcaacctgtatattcttttcttacataatattgcagagaagtcttattgaagccaagtgactgctgtcccatttttttgttgttctaatactgcttttctttttaagctccttagctcttatgccaaatacaaaaataactctgactactttgcattcatatccataacttattttgagtagtgccattaataatttattgtaaaagataatcttacctttaaatatgtgattttaaaataagttttgctgccttcttactgagcttttcatgtcgttctgggtatacttgttctacagaaattcaagtccaattatataattaaaatgacaggtttcaatatattaaatattctacaaagtgagttatatctgaaaattcaggtaagcaagtataatttacatttgtactctaaagtgataagtttttgtgaaaatgccccaaaatatattatttctatccctttgcatgagtgtatttgtatatttcacctctattcattatcttctttggctctcagttgatacattttatcatttcccatgtctgaattacttcctgttaagaacatgaactggattaatagaaatttctcagaaaaaaatattcaaacaccaaggatctcactttgtgctgtgaaatgcaagatgagcaatctgatctggacataccagccttcagtcaggcaacaggtgaatatgcaggtagaattataatgtgtaaagccgggtgcagtggctcacgtctataatctgagcactttgggagactaacgcgggcggatcacttgaggtcaggagttcgagactagccaggccaacatggtgaaacctcgtctctactaaaaatacaaaaaaaagttagctgtgcatggtggcacgtgcctgtaatcacagccacttgggaggccgaggcgagaggatggcttgaacccgggaggctgaggttgcaatgagcagagatggtgccactgcactccagcctgggcaacagagagagactctggctaaaaaaaaaaaaaattataatgtataggattgtggatgatcactctaaccaaccagtgggcaagttgctttgctcagcgtaagttcaaactgccacatcagaacgttatttgagtgtatacatacacaaccattaaaagtggccgttaccacgatgcattctgggaaagaagcagcaccaaatccaagatggcggccagcaggaggctgatgaaggagcttgaagaaatccgcaaatgtggaatggaaaacttccgtaacatccaggttgatgaagctaatttattgacttggcaagggcttattgttcctgacaaccctccgtataataagggggccttcagaatcgaaatcaactttccagcagagtacccattcaaaccaccgaggatcacatttaaaacaaagatctatcacccgaacatcgacgaaaargggcaggtctgtctgccagtaattagtgcsgaaaactggaagccagcaaccaaaaccgaccaagtaatccagtccctcatagcactggtgaatgacccgcagcccgagcacccgcttcgggctgacctagctgaagaatactctaacgaccgtaaaaaattctgtaagaatgctgaagagtttacaaagaaatatggggaaaagcgacctgtggactaaaatgtgccacgattggttccagcaagtgtgagcagagaccccgtgcagtacattcagacaccccgcaaagcaggactctgtggaaattgatacgtgccaccgtctggcgttcgcttgcagcagttactaactttctacagttttcttaattaaaagtggtctaggtaacctgtaaagaaaggattaaaaatttaagatgttcttaaaaaaaaaaaaagtggccattaatagacggaactatacactggactagttgttgttttaaaaacataaaatctggctaccctaacgggataagagttcagacatcaggatgttgacacagtgtcctaccagaacccagggtttacttagagaacataaaagaaaagagattgtatgctatattccttgcttttttttttttttttttggtggatgtagataggagatgggatgagagtggccacaggaattcgatgagtcgtaggaaatccatttttgttttaattgatgtttcccgttgaactgacatttagattgaaatacctgcgagccgggtttggtggctcacacctgtaatgctatcactttgggaagctgaggtgggtggatcacctgaggtcaggagttcgagaccagcctggccaacgtggtgaaaccccatctctattaaaaataaaataaataaacaaataaaagtagccgggcgtggtggcagactcctgtaatcccagctactcaggaggctgaggcaggataatcgtttggaccctggaggcagaggctgcagtgagcccagattgcgccattgcactccagcctgggcaacaagagcaaaactctgtcccccscccacaaaaaaaaattgattgaaatacctggaattcacaccataattggggtgtctttaggctgaaatggagacaacagaaggtgaggtggcttggactcaggtggcattggtaaaggaaatgaaacgcatgcaaatttcacagacaaaagagtagctttgccacctctcattttggctgggctgctctgagrtgctgcatcttttatagtgtctaggctctcatccttaatgacattttcatattctccatcccccatcccccaccgcctctccagtaaggactttttgacaagctgcacttccctgctttagtaattggtgataagatttgtcctgtagaacatatacatagaggattgttcactctcctccttttatgaaataatttttagaaattgagctgttaaaggttgtgtttgcacatgttttttggaacaagaactttaattaaaggatcaaaaagcccaagctcttgcttttgaataactgaagccagtgtctataatttcttgtatctaaaatctgtagaaactagttgtgtgatttcaggggtgcatggggccccttgggtgtctgaacagaagggggtgggaggcagagccgcacctctgcactcttgctctgctggtgtagtgggcagctgcccacccccaccccaccctgcactgcaggctctggagtcagcagattaagcattttataaattatattctaagtatatattttaaacttgtcaaaaagataaatctagcttattttacctttaacttgtaaagaaagtttgccttcttgagttctctttgtcatgggcagtaggagtagctcgcctgagtatcatcagtgaagggaaacccacacatcttggtgagcaacgagaaatcaccatgttaagattccagggattttcttctctggtcattgttgtagccagtgtcttcatggaagacctattttcgtttcattaccatatttgatgcctaagcatttaataatcagtttatgactactaaacttttgaggatcttagaatttaactggctctagaaagtggcagagaaacctacacatgattccatgtcctaacccataagacgtgagtgatacatgctgaggagggaaggtgagtcactccccctgttagtctgagggaatgtgtatgagtcattttgtgcttctttttttctttattttatttttagcataataaagtaccaaaccaagagttgtctggtttttgttttggagagtgagggctgctggtgagggtagatttctgaactaccccagagaacgtagtcaggaacctcccagcaggatgagagaggagccatcagctggaaggagaggggaaaggatcaggagaggtaagggaactaggattgcttaacatgcaaagggtaaagtagaaccaaagagaatttttgtgccccaacaggagcaggaaaatctgagaggatgcccaccaacttctaagattattttattgattcagagaaaatgcaaatttcaaccacagctaaacaataaaaagggaaacttttcatttagaaccaatagttatcatgagttgattaaaaacatgagctggcctaaaggtggtatcctaaacttctggagcgtggaaagtgattgttaaattgccttaattctctacctaacatttttctacaatgcaagcatctaagaaaagactgaaaaagtggtgamccagatayttgaaaagtcagctttcacccaaatatgagaaaatttttaaatgtcaggtgggcaatgatgttggtcttgctcctccagggtgtttgtcttgcagggacactgttggggtgcaggtggtcatgaggacaccgacctgctctatgaaatcaatttccaaagcttgagctcacttccaaaaacacttctcaagcatgatgataaccaactattgatttatcctgagggaataatctttctacaagcttttatgttcactgtgttggcttgtggtagctagtgaaaactgggtgatttcctcccttaatctagaggttgaccatttagaaacacaacagaagagacttccaaaatgaataaatatctcctgctgtttgaaaagtgaaccttctaacagatgaagaaactgcccaggcaggtattctgagtcactgtgtgattctggacatgccactcaacctttctccaggcttaagtgaagttaatgtttttcctcccactgactcacgatggtgccttggggacagaagaaatgaatgttagaaagtccagtgcaaatttctaaaatgccacaggaaaaatcaggtaaaaaacacttttttgtgaaatgtagctgctgtgtaaaagacacgtggcacacagccttcctggctcagggacaaaaatattcatctttctataattcaaaaccaaaagtggaacaacaccatggaaggttttaagaagggaagcagagtgtcctttttagaccaatgaggtgagtcatgttcttttctgatgtctctgggaaagatgtgatcaacataaagatgttttattgccaatgcctaggtaaagcaatctcagtattcatgtctcagaaacatgtcttcagatgcagtttcacctctctgaaaatgagctctcctatgggaaggtttggttactagtataattacaggcttctgagggtgccctggctgtgtcttttgtccattcccaactgttgctccttctttaaaatatacatatgtcatgcctctgcctgaactcttgacagtactgactagaatgccttttcctactagtggaccacatgcataaaatagtttcacaacacatggttgttggaagggccatctctgatgcagcatatataccagcacttaatgttagcatctctcaccacttagtgaacaaatttagtcataagtcaggctgggattctaattttttttattatttatttatttattttacaggcagggtctctgttgcccaggctggagtgcagtgcagtggcatgatcatagctcactgtaaccttgagctcctgggttcaaatgatccttctgcctcagcctccagagtagctgggactacaggcatgtgccaccatgctggctaatttcttttaaacattttttgtagagacagggtctcactatattgtccaggctggtctcgaacttcggcctcaagtgatcatcccgcctcagcctcccaaagcactaggattacagatgtgagccaccgtgcctaccccaggctgggattttaaagacaggcaggcaagggcctttgttagaaggaaattgtccaaaatttcagcaagcaaacatgtgttttttcttgatgaggacaccatacaacacacatctccactagtgcaagacacttggaaatgggctttaccagcgatatgtccagaagaggtgaggcgctaagacagctagtttactggcctcagtatttctcttgctcactagcaagagaaataggtcaacatttcagaatcacatagaattctgaggaatccatgaggtacagagactcatgcccacgtcaccctctaaagttcaaaggatatgcctttacacatgggaagatgctatgcagtgactattagaaaaggttagaaaaatttaaaagggttttttgttttctgtttttttgtttggttgatttttcggactcaccaaagtagccactagaccatcaagtttgagagacacaacttcataaaacacaaatgtctgtaatcccagcacgttgagaagccaaggtggatggatcacttgagcataggagtttaagaccagcctgggcaacatagtgagaccctcatctctacaaaaaatacaaaaaaaagtttgccaactatggtggcacatgcctgtgatcccagctgcttgagaggctgaagtgagaagatcacttgagcctgggaggttgagactgcagcaaactatgattatgccactatatcccagcctggatgacagagcaagaccttatctcaaaaaagaaaaaaaaagaagaaaaaagaaaacacaaatgcctgtttctgtattaatatactcttctattaccatgaaaagcttggagaggccaggtgcggtggctcatgcctgtaatcccagcactttggaagtctgaggcgggtggatcacgaggtcagtagttcaagaccagcctggccaagatggtgaaaccccgtctctactaaaaatacaataattagctggactcggtggtaggcacctgtagtcccagctactcaggaggctgaggcaggagaattacttgaactggggaggcagaggttgcagtgaaccgagatcgcgccactgcactccagcctgggcgacagagcaagactctgtctcaaaaaaaaaaaaacaaaaaaaaaacagaaaagaaaagcttggagaaccagaaatttaatttgtttactctttcattaagttgtccaacaaactttattgaacacgtccaatgaccaaaagctgcacttgggtctggagatacaactgtaaaggggacctacaccctgcctttgaggagcctccaacccttaccccattttaggctgtgcatatgtagtttcaggctaatttgcacaactggaccacctatttagaacatgagaatcagagacaagtggtttcttgaactcatcaataaccaattatcactaaaaagtctatgtttagatatgagaaagtattccgtgacctatttcataaacctcatttaaaaatatacttggtggccaggtgcagtggcttacacctgtaatcccagcactttgggaggctgaggtgggaggaccacttgaggccaggagttcaagaccagcctggacaagatagcaaaaccccatctctaaaaaaactaaaaaaaaagttagtgaggcatagtggtgcatgcctatagtcccagctactcaggaggctaaggcaggagcatcactggagcccaggaatttgaggctgcattgaactatgatggcaccactgcactccagcctaggcaaaagagaaagaccttgtctctggaaaaaaacaaaaccaaaaaccaccaccaccaccaccaacaccaccaccaccaccaccaccaacaaaaaactcagaaaacaaaagtaaaacaatggactttttaatcctaaagtgaggtaatatacctgaacacccatatatttttggatatccacaacagcaaagcagaaaaggtgaggtgaaggagagatgcttgtgggggccccttcttttccatcattttagaatcaacttgttttctctgtatttgagaagtatttgaggccatcacccccaagaggccaatccaactgtaatggagtcacacagactcacatgatcagatagacttggcttggttgtgttttttgggttttttttggttgttgttgttgtttgtttgtttgtttttcaagactgagtctcgctctgtcacccaggctggagtgcactggcacgatcttggctcactgcaacctcctcctcccaagttcaagtgattctcttgcctcagcctcctgagtagctgggattacaggcgt

SEQ ID NO: 93977 - DNA, 29589 bp, Homo sapiens
  misc_feature (1)...(29589): n = A,T,C or G
gaagcagggatttctaagcaagaaactgtcagtgtttttcagaccttgtgtcagaattcctaagggcctgttggggaaggattgtgccttcatcctgtctagcaaaagtggggctgaatgaatgcagctatattgcctggtgatagaaatagctcactagttctccacctatggaactgtaccccacctgaatggcagtggactgaggaggaggtacttgctagactagtattgctgcctgcaatctagaccagcacagtggcggttctaatgttcttcccaaaggtgaaaaagtttaggtattaatggagcaggggagaagtagctgagtgtaaaggaatgaataaatgggttataaatgaagggaaatccaacattacattaacaccttgaaaggggctcagagcaagagatgacatgtctcttagctcaattataacagatgtctgaaagggtgcagctatatgtttgctcctgcttttggaactgattgaaaggaaatctgcaaacctgagtgacctccctctgaagacattaatgagaggtgacagcgtgctggcagcccttgctcactctcagtgccttctgcgcacactctggccatgcttgaggagcctttcagcctgctgctgcactgtgggagcacctctctgggctggccgaggctggagctggctccctctgcttgtggggaggtgtggagggagaggcatggatgggaaccagggctgcgtggtgctcactggccagcatgaattctgggtgggtgcgggctccctgcccccccccccccaccccatgggctcctgtgctgcccgagcctccctgatgggtgctgccccctgctccrcggtgcctggtcccattgaccgcctaagggctgaggggtgcaggtgcgtggtgcaggattggcaggcacctccacccacgtggcctcagtgcaggatccactgggtgaagccagctgggctcctgaatctgctggggacttggagaatgtttatgtctagccagaggattgtatacgcaccaatcagcactctgtgtctagctcggggttcgtggatgcactaatcagcactctgtatctagataatctggtggagacttggaggacttttatgtctagctaaaggattgtgaatgcaccagtcagtgctctgtgtctagctcaagtttgtaaatgcaccaatcagcaccctgtgtctagctcaaggtttgtaaatgcaccagtcagtgctctgtgtctagctcatctagtggggacttggagaacttttgtgtctagctaaaggtttgtaaacacaccaatcagcaccctgtcaaaattggccaatcagctccctgtaaaatggaccaatcagcagaatgtgggtggggccagataagggaataaaagcaggctgccccagccagcagtggccacctgctcaggtccccttccacactgtggaagctttgttctttcactctttgcaataaatcttgctgctgctcactctttggctccacactacctttatgagctgtaacactcactgtgaaggcctgcagcttcactcctgaggccagcgagaccacgaacccaccaggagaaatgaacaactccagacaggaggaacgaacaactccagacgtgctkccttaagagctgtaacactcaccacgaaggtctgcagcttcactcctgaagccagcgagaccatgagcccaccagaaggaacaaactccaaacacgtccaaatatcagaaggaacaaactccagacacgccatctttaagaactgtaacgctcactgcaggtgtctgtggcttcattcttgaagtcagtgagaccaagaacccaccaattccggacacattttggtgacccagaagggattattgcctatcaccaagcagtaagactatcaccaagtggtgagaccattgcctattgttragcggtaagactgtcacctattggcaagcagtgagtaccattggaccccttttgcttgctattctgtcctatttttccttagaatttgggggctaaataccgggcacctgttggccagttaaaggtgactagcgcggccgccggcctaaagacacaggtgtcaggctttctgggaaagggctctctaacaacccctgactcttcagagttgggagcgttggtttgcctggaaccggcttctgcttttcctgtacttctgggctgagctgagagtcaagagagaggaaagccattcagctccggggtcctgacaacaagttggctgaccctgcggtcatgagcggaactctcaaaggcrtgtcacctaagcgagactcgcccatctatcctgtctatcctgacccttgccccctgggtcctaatgcctgccagacaaacttcctctcttctccgagattagtcccacttctaaaaatcgctccctgtctctggggcttttctagtttctcctataagaatgacttctagtataaactccaagactctgttaacttctttaggcaccctggctcaccaatcagaaaggcataattattgcccaaagccctgttgtaggggggactacctggaattttaggatccctcctcagactaacaggcctaacaaaagctattcctgaagctaggatatggggagccccagaaattgtatccttcctattcatataagtgaggacaaaaggtgtcactattccaaccctggagatcccttccctccctcagggtatggccctccacttcatttttggggcataacatctttataggacatgggtaaggtcccaatactaacaggtgaatgcttaggactctaacaggttttcaagaatgcgttggtaagtgtcactaaatccgatttttctcagccctccttgtggtctaggaggacaggcaagggtgcaggttttcgagaatgcatcagtaagggccactaaatccgaccttccttggtcctccatgtggtctgggaggaaaattaatgtttctgctgctgcgtcagtgagcgcaactgttctgatcagcagggtccagggaccattgcgggttcttgggtaggggttgtttctgttgctgcatcagtgagcacaactattccgatcagcagggttcagggactgtcacgggttcttgggcagggggagaaacaaaacaaaccaaaaccgcaggcagttttgtctttcagatgggaaacactcaggcatcaacaggttcacccttgaaatgcatcctaagccattgggaccaatttgacccacaaaccccgaaaaagaggtggctcatttttttctacactacagcctggccccaatattctctctctgatggggaaaaatggccacctgaagggaagtacaaattacaatactatcctgcagtttgaccttttctgtaagagggaaggcaaatggagtgaaataccttatgtccaagctttcttttcattgacagagaatacacaacaatgcaaagcttacaatttacatcccacaggaggaccgctcaacttacccccatatcatagcctccctatagctccccttcccattaatgataatcctcctctaatctcccctgcccagaaggaaataagtaaagaaatctccaaaggaccacaaatgcccccaggctactggttatgtccccttcaagctgtagggggaggggaatttggcccaacccgggtacatgtccccttctccctctctgacttaaaacagatcaaggcagacctggggaagttttcagatgatcctgataggtacagagatgtcctacaaggtctagggcaaaccttcgacctcacttggagagatgtcatgctactgttagatccaaccctggcctttaatgaaaataatgcagctttagctgtagcccgagagtttggagatacctggtatcttagtcaagtaaatgacagaatgacagctgaagaaagggacaaattccctaccggtcagcaagccatccccagtatggatccccactgggacctttactcagatcatggggactggagttgtaaacatttgttgacctgtgttctagaaggactaaggagaattagaaaaaagcccatgaattattcaatgatgtccaccataactcagggaaaggaagaaaatccttctgccttcctcgagcagctatgggaggccttaagaaaatatactcccctgtcagccgaatcactcgagggtcaattgattctaaaagataagtttattacccaatcagccacagccgcagatatcaggagaaagctccaaaagcaagccctgggccctgaagaaaatttggaggcattattaaacctggcaacctcagtgttctataatagggaccaagaggaacaggcccaaaaaggaaaagcgagatcagagaaaggccacagccttagtcacggccctcaggcaaacaaaccttggtggttcagagaggacagaaaacagagcaggccaatcacccggtagggctcgttacagtgtggtttactaggacactttaaaaaagattgtccaataagaaacaagctgccctctcgtccatgtccactatgccgaggcaatcactggaaggtgcactgccccagaggacaacggtgcactgcctcagtgagaccaagaacccaccaattctggacacattaatacaatatgatggactggactaattattactgattaaatggattctagtaatgtggcagtactttttaagttgtatgtccttttaatgttcaaacaccttggtgttcaaaggtgggggagggtagcctgtgctattgtgaaatacatatttggtcttcctctgcttttctggcatacaactcctaaattcgtggaatctctacagtgctgtcttttgtatgctaatgttgactgatagctgcaggatggggctgttcaattggaaggacaaagacatggttaaagggttgggactttcagccccaaaccccaacctctatgtagcgaagagggccaatggcttaatgaatcatggttacataatgaagcccaataaaaacccaggactggattcctggagtttgaggagagctgaacaagtaaaggttcctggagggtgacaggcctagggagtatatggaaactgcatgcctcttccccacaactcaccctatgcctctcttcatctatatccttggtaataccctttatagtaaactggtaaacttcagtgtttttttgagttctgtgagctgctccagcaaattaattaaacccaaagagggggttgtgggaatcccaacttgaagctgattggtcagaagttctggaggcctggacttatgactggtgtctgaaagggaggcagtttggggacagagccctcactctctgggatctgatgctgtctccgggtggatagtgtcagaattaaataggaggacactcagctggtgtctgctgcagaattaattgtttgcttgccggtggggagaaatccccacatattttggggtcacagaactcttctgtgttgattgtttttgtgtttccagcagaggaaaaatatggtgtgaggttttttttgaaataatatacataatttgttctttcttttttcttaaattatgagctagagcatttatagggtagggtgcaaatgcatttatgtgcaattttaagactaataaagaccactaattctgcttaagaaatagaacattgttggcatcccggaaaccttaaatgctcctccccaataacaaccccattctcctcactagaagtaacgattatcctgcttccttggtrattattttcttgcttttcttcatagtttcacctcctatgtatgcatccctcaacactagttttgttttacccgttttggaattgctatamatggggaagaaataccatacagctggtcagtatattgtttaatttttttaaatatcctttagaaaactttgagccaggaatcatggcagccagacccaagctctactactttcatggcaggggcaagatggagtccatccccctggctgctggctgcagctggaggggaggctggttcctgactgggattgggaaggatggtaatttgggtgggaatgaagtggcctcctttctgcttcaagctttggaatggtgcctacaggctgtatctattcttttcctttccaattgtcttcctttgtaagaggtgagggagggatcacaggatgatggaggattagggaggattgggggagctgtcgggtgaggtcatgttctagaagcttcataggggctaaaaagatttttgtggatcacaagacaaagaagagagaggagacccacatctgtctcgttctcttcattgggaccagctgtttttctggggtctttcagctctgcctcagcaccccagtcatgtagtactcatggctgctggaatgttaggcctagctgcagtctggcctcccccttaactcctccctgaaagatctacctcatgggatctttccttaactctgaattccctccacactgacttttccatagattttcacaagtgccttggaattattttatacagatgtaggcttccttttccctatctgaatgccaacttctctagagcaaggactcattactttgtttgtttttctctattcccttttagggacatctccacttaaactgcttacccacatctcaaggtttggggggaccaaaaaaatcaatctttctcacaaaagctttagaaacatcatcaacaaatcatgataatctcacctgattaaagatctctggattcctttcattgaacatmtgagcattaaagagaaatttaacttgtctttatatgaagggaaaataacagaggaggaagaagaaagagaagaggaaaaatcattggggaagttggagaaaggacataagtttggaaagaaggaagaacttaggtgaagaaaaggaaaaagaggaatgggagcaaaaataaaaaaatcaacaaaaaacaaaatctctttgttttcttgaggactttaaagttggaataatgtctctttatcttttatttagtttgaagaagaatttcttgaaacgagaataatatgaaaagttgcagaagggtaagcctagatttgttcaatattatcttattagagaaaaatggaaaacctgctttgggaagtatttgttttgataaaagagacagagctctagaatggctactgctagaaaaggcaaacacatagcatgactgctaacattgatcggctgttcatcatgttcctgamacacagcttaatttgcatcagcaaaggccacaccagttagccttcagaaactctyatcaagtaggtcatgahggtgactttggttaagaggatagaatgaaactcatatgtgtcagagctaattggtttaattcttcccatctcactgaagaatcctttaagaatccccacacccctgcacccgcctaatccccgccatgttagccaggctcgtctcaaactcctgacctcaagtgatccgcccacctcagcctcccaaagtgctgcgattacaggcgtgagccactacacccagtcaacaccctaaactttgagaatcagaagcgcttatactataacatagttacagtaaatgtagaaaatcttaaataatcatgttaaccaacacacaaaagtgcatgagactaccaaacgaatctcagatttaacatgaagcaaatgatagccatttcctaaacaactagggtctttaattcatcactttggatagaacctaaaaatcacagatagaaattagaagtgaaccatccttagatttactgcaaccactgaacaagggtatcttaacctctctttgctcaaaccacagatggatgmttgcttttcggccaagtgtctttggttgaaatggatggaatggtgctgacgcagactagagccatcctcaactatcttgytgagaagtacaacttctatgggaaggacctgagggaaaaagtcaggtaccatagtgttcattactctacttgattcttagacaagcttcttcacttctccaccaactgagacctggttcaggtgtacctttcaatctggattgagacaaaaaagacaaatgggacaaaggggaaatgacttgctagacctggcatgccttgtacttattcttttttttttcttttgagacaggtctcgctctgttgccaggctggattgcagtggtgtgatctcagctcactgcaactaccacctcctgggttcaagcaattctcatgcctcagcctcctgagtagctgggaccacaggcatgtgccaccatgcccagctaaatcttgtatttttagtagagacagggttatgccacgttggccaggctggtttcaaactcctggcctcaagtgatccacctgctttggtctcccaaagtgctaggtttataggcatgagccaccatgcccggccaccttgtacttactcttaataagtactccacatcccccttttctgtgtactactcatagtgcactgaaygctgcattcaacattctcctattctctccccactcctaacaaaatatgttcttagaaaataaactggtaagctattctacatgaaggtagaaatgactgattcatcacacacatactgagcattgtatcaatgatctgttgactataaataatgctctaaaacatatcaccttgaaacacagtgacttaaatcagcaagcatttgttattgctcacctgtctatgggtgagcaagtatctgagtggcccatctggatcaagcttgacttagctaggctgcactcactcatgtctatagttagctagrtagctctggtcgtgggtgttggctatcaattgggatatgaatagaccatktatctctcatcctctcatcctgagcttgttctcatggcagcaaggcagagttctgagagtgagagtgaaagcayactggcctcctaagttctgggttcagaattggcacctcatcatttctacctcattacactcattaaaggaagccacaaatagactgggaaatagaccccatctattgatgggaggagctgccaagtttcatcacaaatacaagaaggtgaagtttttggcctttttttgacctctgtataccacaaacatctatgctacactgggcactgtcctaggcctgtcagaaaatgattgggtaattattcacggggatagtttagtttcataagaaataactagacttaagacaaaacaaatacttgcaactataaactcttactgggatttggggtcctggggccttttcagaggtccctaaacagtcatcactatgagcacggacacagtgtgggtggtcagtatgcacagaagacgctgagggagaaagcccagggctcaattgttcagaaaaaggagaaagaacataacataggaatgagcaacgtccataaaaagtagcagcccatgccaactttcccatatcttcatctttaaaacaggcttagtcattccaacctgtaattctgaaggtatatggcaagagaagcaatgtcaaacagtatgtgaacatggtacttttgtaaataagtacaaatatgcaaacacagtctgtttcttattgttttgatgcaaagtttttaattggtctttaaaaatctccttggtttttttctaagacatgctaaggtatagatggtgttgttaatattctttttctttgggttagccataaattgtagtaaactaaagcaagtgggctaggtgacactaacatgaaagaaaaattatttgtaattcaaataggacaatgaaagtatattactcaattttttctttttctttttctttctttctttctttttttttttttttttttgagacagagtcatgctctgttgcccaggctgcagtgtacyarcatgatcttggctcactgcaacctctgcctcctgagttcaagtgattctcctgcctcagcctcccaagcagctgagaccacatgcatgtgccaccacgccctgctgacttttgtattttcagtagagacaggtttcaccattttggccaggctggtctcaaactcctgtcctcaagtgatccacccaccttggcctcccaaagcrctgarattacagtgtgagctaccatgccaggccttttttttttttttttaatttttaararatggcatctcagtatgttgcccaggccaractcaaactgctgggctcaagcaatcctcccatctcagcctcccgcatagctgggccatagatgtaccaytaagcctggctccattattcttttatgctgttaaaaagaaaaagactacagaagaccattaaaacaaattcattaagcaattagcatataatggggaatacaaagacactcttgaagacataaccagcacagcatgaatgtactaataggccagtaaataatggaaatatagatactatggtttgtttgtttattgatttatttagtgcttggcaatgaaaggaaaactttaaagggaaggaaatacaacagtttgacctgactaggaaattaaacttttctttctcagttgccaggtcaacagaagacctgttaaattatctgtcttctctaagtaagtgaaaatgttctggtactaattgttttgtagttttaataaacttcattgagtttagtttttaaagccataataatcaattatttgtttacggcagatttcaacttaagggcattcatgaattctttcatacatccttttattcaataagtatttccagagactctactatatcctgggcacttggctggttctggagctagaaatcattcatgagagtggaagcttaagaggaaaaataaaaattattttttcctgcatctatttgtactagagaagtgttggattaagaaccctgtactcaaaagctctccacctgagggtcaaatggttgttttgtcaggatcaacatgtaagttgatggcaccctggacctgacgatgatgataattgtggcccccttcaaatcccctgaggaaaaacaggagacccttgcttccatcatgtagaaagctaaaactcagtacttgcytgcctttgaaaaggtaggcttcagggatccagggcttttaccttttctgtttctgagaatatttcaagagtgaatatctgaaaagacacacagaggccaygttagagctttactgcttttggatcaaaactttaaaaaggattccagaacaaattacaggtaaaattatggaaactccaacaaaatagagttggaatataccaagtacaatgaaagtatacagcatttctgttctgtcttttaaattaagacatcagaccaagatgtgaccaccttgaatactgtcaggtatttttttaggtctaatactagaggctaatcatgcctcaatcaaaagataaagtctctctctctccttttttttttttttttttaagacagagtctcactctgtcacccaggctggagtgcagtggcgtgatctcggctcactgcaacctctgcctccccagttcaagcgattctcctgcctcagcctcccgagtagctgggactacaggcgtgtgccaccatgcctagctaatttttgtatttttagcagagacacggtttcaccatgttggccttggtctcgaactcctggtctcaaactcctgacctcagatgatccgctcgcctcagcctcccaaagtgctggcattacaggcgtgagccactgcaccaggaaatcagccatttttttaaggagctctggttccttttatgtttaactttttcatgccaatagtagtcctagagaattatgatatttgtatgktgttggcacacacaggcaaagcagctggcagctggaagagactgctttgggggctccatcactccaagcctcttttgacaacctcaagagcttgctcttcaaatattctcttattggccaggtgccgtggctcacacctgtaatcccagcactttgggaggccaaggcaggtgggtcacctgaggtcaggagtttgagaccagcctggccaacatggtgaaaccccgtctctaccaaaaatacaaaaaattagatgggtgtgttgacaggctcctgtaatcccagttactcagaaggctgaggcaggagaatcacttgaacccgggaggtgggggttgcagtgagctgagatcgcaccattgcactccagcctgcatgacagagcgagactccgtctcaaaaaamaaaaaaaaaaaaacaattctctgttattgacacacagcagtgaagtgtggcacctgggtagtgcattctggcccaaataaccctccttaatcggatgttggattatttaaaagaacactcatttataagactattttatttaacttggagttggatataatagtttttgaaaatgtaccttagtgtctattatagtttgttcccagagaatcttttaagaaggtggaactatatgattcatttatatcatagttgttatttctgaaataagtagatgctaaatacttgggtgtagtctttggccagggctatgttayttctattctgtaagacacaatgtactaaataattttgattgtgttttggatttaaatacaaacttactaatttccttatgttgagtcraagaactgggaactattcaaaatgtgatatcaccctcccttgccattgagacttgggcttgtgttatttttttagttgccaaaccatcttttcatgatattccttctgatcaagagaatatatcctggaggctgctgtttcaaacaaagcattctctctggggctttgggatagamcttttctctgtgtgaaagagaatgatactgagcagaaaacaaaccctgcttctctgattcacctattactagataactaaactgctttttccaaatcaaagaatactgtacttcaacataatacttcaattcaataatgtagatgctgtattttgaaatatattaagtccaagtttttgtatttagatgtcaaattttatttctgaaaatgaggtgagttttaaaaattattttataagnagatgttcattatataaaaaattaggacagaactgtagaatgtagaaagaaaccactactatcctcaccacccaaagataaatctcagtattatttttatatggttcctcctagtctttcccctataaatacatttttatttgttttttggacttttagataattatgattatatagaagataattttgcctggtattccattacaattaacccctgatcaacatgggagttggggcatataattttgacttctcaaaaactatgaatagcctactgttgaatggaagccttactgatarcataaacagtggattaaacatattttgtagctatatgtattaagtactgtattcaaagtaagctaaagaaaaaactttattaagaaaatcataaagaagagaaaatatatttactattcattaagtggaaatggatcatcataaaggtcttcatcctcatcatcttcacattgagtaggctgaggaggagaaagaggaggggttggtcttgctgtctcaggggtggcagaagtggaagaaaattcatgtataagtggacctgtatagttcaaacctgtgttgttcaarggtcaactgtatttaaaatattttcagaagcagaactgctatgtacctactacttggcagtaacaaatgtcagtacttttattttcttgcttaggaactttactttctccttaaaacaaatgtgtatagatagctaaatcctcctttgaactgtactcaaacattatasccttcctctctcccttctcagaggcaaccactatcagaaatttgatgtaagttctttctcttcatttttaaaaattgagacctggctttgagctgttttaaaagtgtttacagtgtggatcttaaaatatttttatgtacatagcatcatactataagtttattctactacttgtttttatcaaccaactttatgtttttgagccttataggcaaatatcttgtcattgctaatacatttgtatttacccctttcgctttattttatttattctatttacaaaaacaaaacttttctttgagttttcctctgtttttctagatcctggtagatgatctggttttctttattcccaacttttcttctatggttcagaaggtaaacatttctttctgaaactattaatatttatccttctcttgataggacaaagattcaacttttttccaaacttttctttctgtttctgtttttgttaaataatagtttagatccaacgtgtttttaaacttcttctaatttttttttaagccactacttatgtatatttatcaacacatttaactgattscttggctcaccattgctccttgcttctcatgcctttcttctgggtgctttttccttctaagggaagaacattttttttggagttctttcaggaaaggtctgtaagtggttaactctttcagtctttgctagaaaatatctttatttttacctttacactaaaataattatttagatggttatagaattctagattaataattattttacttcaacactccgaagatattattatttcttctggcctagatttttgctttttagaagtcttccattagtgtggttatttttcttctgatggcattatatttatcttttttctcattttagattttctccttgtctggtatatagtatactttcttctttctttctttcctttctttccttttctttcttttccttccttccttccctctcttcctgtagggaaaagaaagagagatcagactgttactgtgtctgtgtagaaagggaagacataaaagactccattttgaaaaatacccatactttgaacaattgctttgctgagatgttgttaatttgtagctttgccccagccactttgacccaacctggagctcacaaaaacatgtgttgtatgaagtcaagttttaagggatccagggctgtgcaggacgtgccttgttaacaaaatgtttacaagcagtatagttggtaaaagtcatcgccattctctagtctcaataaaccaggggctcaatgcattgtggaaagccacagggacctctgccattaaaagcggggtattgtccaaggtttctccccatgtgatagtctgaaatgtggcctcgtgggatgagaaagacttgaccgtcccccwgcccgaaacccgtaaagggtctgtgctgaggtggatyagtagaagaggaaagcctcttgcagttgagatagaggaaggccactgtctcctgcctgctcctgggaactgaatgtctccgtataaaacccgattgtacatttgttcaattctgagatgagagaaaaactgccctatggtgggaagtaagacatgtttgcagcaatgctgccttgttatyctttaccccactgagatgtttgggtggaargaaacataaatctggcttacgagcrcrtcyagkcatagtaccttcccttgaacttaaktatgacgtrgattctattgctcacatgtttgttgctgaccttctccttattatcaccctgccctcctactacattcctttttgctgaaataatgacaataataatcaataaaaactgagggaactcagagaccggtcccggtgcaggtccttggtrtgctaagcgctggtcccctgggcccactgttgtttctctatactttgtctctgtgtcttatttcttttctcagtatctcatcccacctgactagaaatacccacaggtgtggaggggcaggccaccccttcaccttcgtccctctctccctccctttctctctctctctctctcacacagacacacacacacacatacacacacacacacacacacacacacacacacacggtctcactctgttgcccaggctggagtgatcatagctcactttagcctcgacctcttggacctaacaatccacctcagcctcctgagtaactgggactaaggcgcatgccgctgagccaggctgagagagtgtgtgtgtgtgtgtgtgtgtgtgtgtgtgtgtgcatagatggggtctctccatgttgcccaggctggtctcaaactcctgggctcaaaagattcgcccacctgggcctcccagtgttctgggattacaggtgtgagtcaccacaccaagcgattttgtgtgtgtgtgtgtgtgtgtgtgtgtgtgtgtgtagatggggtttctccatgttgcccaggcttgtctcacactcctaggctcaaaagattcacccacctgggcctcccagtgttctgggattacaggtgtgagtcaccacaccaacctattttgtgtgtgtgtgttgtaaagatggggttttgccatgttgcccaggctgtctgatacacattcaacactgtgtgtttacttctaggtttgtgcttatctgcttagtgttcctttttcaatctgaggattctcccttctttttttgttctggaaaattctctaacaaatagcattgaaaatcaccactttcctattctattttgtccctctgggctcctgttagctttatgttgaagcttcattctgtgttacttgtctcttaccttctttcatatttttgatctctgcctccttagatgtgtttgtcaaattactgatttttttcactttctccatggagtttttattatattaatgtttatatttttcatttcaaaactttatttgtatcttcttcaaatccatatgctctttctttctatatgccttttgtggagtactacttagggaaaagtgggagcagggaaaagcaaaaagagaaagcagtaagctacaagtctgtctttcttcatggtccaagacacataatactcctgtgcaaataactcacaatcttcccgttcccaactatcaccagacacctgcaagtcagctcacttcaatcacggcgttatcagtactgcacaaagtccccttttgcagacagcatagacactatctataaaatctccagcaagcctttgtttctttgcagtcagcttctcttctgcagatcctgcccattgcctcctcacaacawagtttcctactttcttgaacaaatctgcctttctttacaactatcttggtaaattcttttacccccgtgccaccagcccagatggtcgttactcacccacaacacctttttatcatctctttgaacatttgaaaacatttttaaccctttacagaatcaactcttatttttggctctgtggttcaaaattctcctttttcatcagtctgttacctctgtctcatagatgactttgggtttccttatatgctgtgtaatttttagctgtgagtttgtctttagcaggagtcctatttcatttatttgatatagcccatcaagtgyttatactatagaattcactgattctggcgatttttccccatccacactaacatttatttttattcttgcatatattacgagaagatacatagcacttgaatttacctttgctcattatttatcaagtatacccatatgcatctggtgcataaagatgcacctgagagatttctaaatattcactcttcactggatagtgaaaaattagctttctatgtggctctggtttggacttgtgggatcacattggtcacttgtttctactggtggtatagccagcaggtttaagctagttgtaacttttgtgtctctctacactggtggatacaattttgcttagccacctccaggtttataataggagcccagtactagcatttcaccacccaaaaggactcgataatcactggcaaaaacttccccaaaaaaattgtgccagtttacagcatgtgttagagtgttggtttcatcctattcttaccagcactggagatttgttgttgttgttgttgttaagattctttattaaatctaatcagtacaaaggcttcatgctcttgttaagtatttagccatgcaaaatggtttttactctcatttgatattctttattatttttctttctgtagattttgaaagaccatggagaggattttcttgttggcaacaaattcagctgggcagacatacagctgttagaagctattttaatggtggaagaactcaaagcttctgttctttctgacttccctctgctaaaggtagtgtattaacatccacacaaagcccagaaaaaaatgaacaaagactgaagcaaaatgtgcctttaggccaatctcaaaagaaacttaagaacattggggtgtgtgtgtgtgtgtgtgtgtgtgtgtgtgtgtgtgtgtgtgtggtggggttttgttgttgttgyttggtttttttgagacaaggtttcactctgttgcctaggttcgagtgcagtggcatgatcatggctcactgcagacttgacctcttggcctcaagcgatcctcccacctcatcctccagagtagctgggaccacaggtgagtgccaccacrcctggctatttttttaatcagggaacctgccccgatagtcacttaggttcttttctattttccttaagcattggccagcttgagaaataaagggacagagtacaaaagagagaaattttaaagctgggcatccgggggagacatcacatgtcggtaggttccatgatgccccacaaaccgcaaaaaccagcaagtttttattagsgattttcaaaaggggagggagtgtgcgaataggtgtgggtcacagacatcaagtactttacaaggtaatagaatatcacaaggcaagtggaggcagggagagatcacaggaccacaggaccgaggcgaaattaaaattgctaatgaagttttgggcaccattgtcattgataacatcttatcagaagacagggttttgagatcaacttgtctgaccaaaatttattaggtgggaatttcctcttcctaataagcctgggagcactatgggagactggggtctatttcacccctgcagtctcgaccataaaagacaggcacacctgggggggccatttataggcctatacctccaggcgtgtattctctttcccagggatgttccttgctgagaaaaagaattcagtgatatttctcccatttgcttttgaaggaagagaaatatggctctgttccatccgggtcactggcggtcagagtttaaggttctctctcttattccctgaacaattgctgttatcttgttcttttttcaaggtacccagatttcatattgctcaaacacacatgctgtacaatttgtgcagttaaggcaattatcacatggtctgaggcgacatacatcctcctcagctgacaggattaagagattaaagtaaagacaggcataggaaatcacaagggtattgactggggaagtgataagtgtccatgaaatcttcacaatttatgtttagagattgcagtaaaggcaggcataagaaattataaaagtattaatttggggaactaataaatgtccatgaaatcttcacaatccatgttcttctgccatggcttcagccgatccctccatttggggtccctgacttcccgcaactctgctaaaggtagtgtattaacatccacacaaagcccagaaaaaaatgaacaaagactgaagcaaaatgtgcctttaggccaatctcaaaagaaacttaagaacattggggggtgtgtgtgtgtgtgtgtgtgtgtgtgtgtgtgtgtggtggggttttgttgttgttgtttgtttttttgagacaaggtttcactctgttgcctaggttggagtgcagtggcatgatcatggctcactgcagacttgacctcttggcctcaagcgatcctcccacctcatcctccaaagcagctgggaccaaaggtgtgtgccaccacacctggctatttttttttttttttttgtagagatgggggtttctctatgttacccagggtggcctcaaacacctggcctcaagcagtcccctggccttggcccaccaaagtgttgggattacaggcataagccaccatgcctggcccaagaacactgttttaaaaatcattctggctgggcgcggtggctcatgcctgtaatcccagcacttggggaggctgaggtgggtggatcacgaggtcaggagatcgagaccatcctggccaacatggtgaaaacccgtctctactaacaatacaaaaattagctgggcatggtggcgcatgcctgtaatcccagctactcgggagggtgaggcgggagaatcacttgaacccaggaggcggaggttgcagtgcgccgggatagcaccactgcactccagcctggtgacatagtgactccgtctcaaaaaaaaaaaaaaaaccattcttggcctggcgcagtggctcacacctcacgctgtaaccctgtctctactaaaaatacaaaaattagctaagcgtggcagcctgcccctgtaatcccagctactcgggaagctgaggcaggagaatcacttgaacctgggaggtggaggttgcagtgagctgagattgtgccaccgcactccagcctggcaacagagcgagactcttctcaagaaaaaaaaactaaataaacaatcattcttttcttcattttggttatttttcttttgcttatctacaggatctgttaggaaataaaactttatgaagggggaaaagaattgattattttgatgtctagcatgaacatttagtactttcctgtttttagtgcttttaaaattttcttcctgacaaaacaaagctgacaagtctgtcttcgttgcttctccctctaggtcctaccagacaaccctgcctgcttttagtccccctgattttggggccccacatagttcctgcattgttcagagcatctgcttaggggacactgtcagcctcctgttgcactgccccagccctcagacagaattccactcctgccagaccttacctggcctctgttccagttcctgagaaacattttatctaataggtaaccacgggtcttgtggtttaagaattagcagtttttcttattacaaaagaaatgcaagttcatgtagttacattagacatttgtgtaaaccaaaagacgaaaagaaaaaagactggctgggtgcggtggctcatgcctgtaatcccagcattttaggagggtgagacaggcagatcacctcaggtcaggagtccaagaccagtctggccaacatagtgaaaccctatctctactaaaaatacaaaaattagctgggcgtggtgggrcatgcctgtaatcccagctattcgggaggctgaggcaggagaattgcttgaatccgggaggtggaggtttcactgagccaagatcacaccactgcactccagcttgggctacagagcaagactctgtctcaaaaaagaaaagaaaaaagacctataatctcaccagccaaatgttatctgcatgagattttctgacctattattttgcattttccctccaaatagggtcatactaaagattgttttgtggcctgcatttaacattcttttcaattatcatgagtatatttacaggtcaacaaatattcttttgaaacagtatgctattttattttcattaatcaatagaatcacatcttctttaaaaaatcagagctatggccgggtgtgatggtgcacgcctataatcccagcacttttggaggctgaagcaggcagatcactagaggtcaggagtttgagaccagcctggccaacatactgagaacctgtctctactaaaaatataaaaaattagccaggtgtggtggttttcacctgtaatcccagctactcaggaggctgaggcaggagaatcacttgcacccgggaggtggagattgtagtgagccaagatcacgccattgtactccagcctaggcgacagagtgagacttcatctaaaaaaaaaaaattgagagctatattaaaagagcataaattcagaattctcattcccaccccttccccgccacctttctgctcccataatcactttattggcattctatgtatacttccagtgttcctatttatgctgataaaagcaaatcggaatatatagttgtattctttgccactctcaagtttcttgcacaaaatagaaaatagtgtatattctgttctgccccgggctttttattattattattattaatgcattttagagatccttccttgtcaatacaaggaccttcctctttcctgttacataagagcattttaaattactagtttatactccttgtagagaagtaccataatttacataaccagtctccttttcctagaaacataggttctttccaatttttagcatgttaacatcctttttttttattttttggtgggggacagagtcttgctctgttgcctgggctagagtgcagtggcacgatctcggctcactgcaacctctgcgtcctgggttcaagcgattctcctgcctcagcttgctgagtagctgggattagaggctcatgccaccatgcccggctaatttttgtatttttagtagagacagggtttcaccatattggccaggctggtctcraactcatgacctcatgatccatctatcttagcctcccaaagtgctgggattacaggtgaaagccaccacgcctagcccctgttaacattcttatagctatttctttcttaaaaaaaagttttgtagagatgggggtctcactctgttgttgggctggtcttgaactactgagctcaaacaattctcccacctcagcygcccaaagtaccaggattacaggtgtgagccaccacacttggcctcttatagctatttctttgctcacacccttacttattcctttataataattcctaaaacaagaattgataggtcaagaatatgaatgtgaccagatgtggtggctcgtgyctgtaatcctagcattttgggaggctgaggcaggtggatcactagaggtcaggagttcaagactagcttggctaacatggtgagaccctgtctctactaaaaatacaaaaattagccaggtgtggtgatgcatgcctgtaatcccagctacttggaaggctgaggtgggagaattgcttgaactcaggaggtggaagttgcagtgagctgagattgtgccactgcatgctagcctgggcaasagagtgagactccatctcaaaaaaaaaaaaaagaatatgaatattttaggggtatgcactgcctgattgtgactttttaatagataatataactcatgctaaacwtgtcagcagttgtattattatccatcccagaaatacccagcaaacayttgttgagggattaagcagattcagtacactgtactccataaactgaggtctaagcacccttcattcatgacaaagttgagatttttcttaaaggttgtgactgctattgaggccctgattttactctttcttatttcaggcatttaaaayaagaatcagcaacatccctacaattaagaagttcctgcagcctgggagtcagaggaagccacccccgatacccactatgttgaacttgccaggaagatagtgctgctctaatggcagcaggttgcgtgatgacaaacatgatgatccagtcacagcaccagcatgtgctgtctgcagaggataatagaagcaaactgtagatcccaggagcaaagtgtctgaaaagaacaaaaccatgctgccattaacagcaacgctgattaaatgtagtataaaatcattcagatgtgtgtggctttttaaagtttgtcagttgtggatgatagtctacaacttttatgaaataaatgttctgtataaataaataggagccagatatatgtagggcaggggcccacatataaccctgttcttctgtctgcatcaagattgggaccattgagggaacagggaccagcaatttgcagggaaggatctctccaacacccaccataattgctgagtacttggggtaagaaaaaaagtggcaaatgacaaattaagagttagacattggctgatgctagtaaatcttacagggatgtgtggggaacagagaatgttcattctgaaaccctgaaaaaaagttggatatttagacaacacttttccacctaacagagccacccaagactgaattttgctatgatgaaacaattccaagtagcactgagattaagatataataatataactgacaaatactacttatacaagctgaacaaaagactccccagccttgatacatttttttttttttaagatacagggtcctctgtcacccaggctggagtgcagtggtgcaatcatagctctctgcaaccttgaactctttctttaagggtacctattatgttctaaactgtaaaatttgaaactcagcctcatgttggggcttgtttgatgggaggcagaagagctgactttgtcgcagagcatatattcaggatgatgttgtaggcataattgtagttcctggtggtctctggtctgaagcaaggtctctgatctgccagtggtttggggcacacaactctatcagcttccaactcctgctgggacattccatcccgggttgcacactttattaacagctgagtgtgtatccaggtatatgtccttccttgtgaaatgacttaattaccaccagacttcatgccatttcctcagggccactacacggcataaccattccctacattaccttctgccccattcattcttcttcttctcttcagatgatggactgagcaacagggttttttctgataacccaggccattcagcatccccccaagccagtccatgtagacctgagctccagctcccagagtggtcaaatcccaacctggagattagtattcagcttgtcgtcccacctcattccccaccctgagcaagccattgccagccagctaccagatgatgaaaaagacagagtaatatggattgggagaagaggcttttcactggaaaccctgcacctgcttcccgtgtgggatgacttttccccctgacctccagcaaagccaaggatctgaacttgtaggaattgagtggaaaagaaaaattcatttttaataattcaaaactgtaaaccaatttctttttgttataattacatggccttggttaataattcagacagtataaaaggctatacagtgaaaaaggaaatccttctttctctgaattgctttcaaaacaaccacttctgggcctttactccttactctaatgcctcccttgggtttccaagtgctgtgtgattgagttcctggtgctccaagccacttttcctttggttctacttcataggttttgaaaacaagcccttaggcctgacctctgcctggcatgctggcatgctctcacagaattccccaaagtcaccacagacacagccagccagccggtcagtgccagaagcatgtttcattgtctagtcatctcgtaagtacaagttgatgtctttcttgtaatagtcttcatctcttcattcttccctgtgtggttttatttgggcctgttccctagcttcttggttggggtctcacccaaactagtagaggtaaccatgggtgcccgaggaaaagtgagcctcagagaccccaatagcacacagcaaacattcaaggccccactatgatgccccccatcaccagagagccttacttttgggcagagagagaaaggcaagtgaaagcatctagctcaacatactcatcaaaatggagggctgggggcttaaaagggccttgatcctttattccagaagatactgggatagaaacactactactagtcttagtcctccatttagcactctggcaagtgaaaatttattttcttttcttggtggctataaatctctcctgtttcaatgaaagcctatttttgtcattgtttggacatcagtgtacaaataattcaaacctaagcagtggcccccataatgaccccttgatgttggtaattactccttcttttagactcctctgtaagctttaaatgtgtgatygctgcatgagtttcttggcacagggctagagggaggggttaagaccaagccagagacggtttgcttccattgactgccggccctgagcaaaattgatagaaagaagtttggctttgattttggtctttgattttctttatcaggagtgcgggggtcagaggggagttgtagttattactttcaagcaaagaagggggtttattaatacacacatatggaaagatgagtgtgaattcagggacattcagacagtcaggatggcccaaaactcattctgacatctgtgttggcctcacatccttttgtggttcggttgttggctcacctcttccttggtgcccctgctgctgccatggaggtcctgatgcagccaaaagtaaccaagtggaggaggcaggagaagttcctcaaaagagtggggctggtattaccagaggaagaggaggagagaggaggggccaacagaaccacaaaggtctactgtctcctcagtttccagttaggaaagtgaggctcagcgagtgccttaccatatgagccatgatcctactgtatggtgttgccagcaggcatcacattcttagggaagggaaaatttagaccaaaaggaagaaggcaaatttgcctaggatcataagttaatgagtggctgagccagagcctggatctagaagtcaggactcaaggttttaaaatatatatggcagcaacctgttgtttagcttgggagacttgaaatagctaggaaatagatctctcctgtttctaaggggtggcaaatatgaaaatggtgtttccactcagagtccttgcagccatttttgtttgtttgtttgttttgttttgttttgagatggagtctctctctgttgcccaggctagagcacagtggcacagtggcacgttctcagctcactgcaacctccacctcctgggttcaagcaattctcctgcctcagcttcctgagtagctgggattacaggcgcacaccaccatgcctggttaatttttgtatttttagtagagacgaggtttcactatgttggccaggctggtcacaaagtcctgacctcaagtgatctgcccgccttggcctcccaaagtgctggggttacaggggtgagccactgcacctggctattgcagccattttaatgctatgatttattgtatatctatttttcccctaagcccatttcctgtaatcccagcactttgggaggcttgcttgagctcaggagtctgagaccagcctgggcaacctggtgaaaccccatctctaccaaaaaatacaaaaattaaccaggcatggtgacacatgcctgtaatcccagctacttgggaggctaaggtggggagattgcttgagcctggggcatggtgtgattgcgctactgctctccagcctggacaacagagcaagaccctgtctcaaaacaaaacaaaacaaaacaaaaaaccttgcaaggaatagaattttttttctttcaaattataacacctttggaacttatgcatttttttgacaaatttttcgtcaaagtaaaataaacatacagtaaaggggacacatcttaagtttatagctcaatgttgtttttgtttttacaaatgtcttctttctttctttctttctttttttttttttttcaggatcttgctctgttgcccaggctggagtgcaatgtctcgattgtggctcactgcaaccttaactttcccagctcatgtgctcctcccatctcaacctccgaagtagctgggaccacaagcatgcgccaccatgcctggctaattttcttttttatttgtagagagagggcctccctaggttgcccaggctggtctcaacttcctaggctcaagggatccttccacctcagcctcccaaagtgctaggactacaggcatgagccaccacacccgaccacatgtctattttttaaacagcatttttgaggtacaatttatttatttattatagtgtttcatgatttttagtaaatgtatatatttgtgcaaccatctcttcactccagttttggaacagtctcctcaccccaaccaaagtgtccttgttcttgccaaatgctgctcccacccctggccccaggcagtcactgatcttctggtcctggtctattttacttctgcacagtagcactggcttgarcccacaatgccaagacagtgctcctgggccttcttcttgtggctctttcttcctgaatcaggaaggtccagcagaatttccctcctaaccctgtagctccatctctcaccagcaaatgaaacaaggcatcacagacatcaccagccaaacagagttcaccaagtgtattagtctgttctcacattgctataaagaaatacctgatactgggtaatctataaagaaaaaatggtttaattggctcacattcctacctgcaggctgtatgggaagcatgatggcatctgcttggtttctggggaggccttaggaaacttacgatcatggtagaagacgaagggggtccacctcatatggccaaagcaggaccaagaaagggagcggggaggtgccacacaccgttaaatgaccagatctcttgagaactccctcaccatggtaaggacagaaccaagggaatggtgctaaaccattcatgagaaatccacccccatgatccattcacctcccaccagaccccacctccaacaatggaggttatgattcaacatgagatttggtggggacacagctctaaaccatatcaccaaggtgctgtggaaaagatttcagagactcctagatcagttaagtactctgaggtatgatctcaagaaaacaggatttaatgcaaaagtaagctatacttcaattaacagttttgtacagcagtgtgccacgaaaaggggctaaagggcaggaatttgcagactgttctagcacttgcacataatgaatattctgggctcctaccacagaactcgtgtgccctggaagggttgcagagggccaaggtatcaatcatctcagcccttggggaagctggagcagcctccgggtttacacccaggacttacacatattaccatttcttgtctctgccaatttgtgaaaggttgggaatttgctcttgcagggctgatggtgggccccgagtttatcatttcatgagtcaagccagctctcaacatcctgccactttcctagtttggattctgtacttatcacagcctcacttgtagagttttctccagggttgagagtgtgttagctggtcctcaggtgcgctcttattttctgggcaattatgctcttcttgttaaacaactgatattgctatttgtatatacctagtgtgtatgtatgtatgtgattgtgataaaatacacataacataaaatttaccattttaaccattttcaagtgtacagtaagtggtattaagtacattgacattattgtgcaattatcaccaccattcccatccatctccagaactatttcatcacatcagattaaaactctctacccattaaacaatgg

SEQ ID NO: 93978 - DNA, 12952 bp, Homo sapiens
cttttatcactgcttacttttactattatcatggattgatctcccagtagatggtaaattcactgaaaggaactccattctactggtttttttgtctcaagtacccagatacaatacttgaaatttaaaaagaacttaataaatatttgttaatttactacgtatattaaccttacagcaaacacatcatatatacaaagtcagcacagatacagaaaaaaaaaaaaaaaaaggaaagagggttctgtcccaggtataaatacacagaagatcagaaaaagcttctagagagggccaggtgtagtagctcacacccataatcccagcactttgggaagccaagcggggaggatcccttgagcccaggagttcaagaccaatctggtcaacaaatattgactacccactacatgccaggtgctgtctgggtattgaggattacagtaaataaaacaaagttcttgccctcaggaagctggagacataacttaaatgaacaaagtcatagatgtgagaaaatgtgaactatgttctaaaagggcaatacagtttagccaatcacatggttcaagtacaagcaaattaatatggcagtggagttagactggattggaaaaaagaaatatgaggttgtggggggaggttacaaagctacttcattaggcaaagtataatgtgttgatatcctgaattggggtagttaaatgcaaagaagggaacgaccatacaatgtacctggcacagaacaggaactcaaatctttgtcgcgttaataatgaatgaagacaggatttatataagatagaatgtgtttctgtttgattgttggggatggaggagagacagatgtcaaaaattactaaaggttttaagccagggcagtcattacaacagtattctgctaatagaaatagggaaaagaggaggaattttatctgtggagataataaatttgattttgcatgttgggtcgagggaccaaagaaaaataatggaaatgtcatttgggtttccattaggtacacgagaaggaaaacatgggaatgaagacaatgagaaacaacaaagattacaagaataggaagagaataacagaagaaaagtaggaagagtttgagaaagaggaaagaggctgagttacagatataaggaaataataatattgctttcaaacctgactcagttgataattcataaattcctagtctcagatcacctactctggatcttggaccatccctcaccatccttctgattcctaaaattgtcaaataccgctgagtatctaattgcatatcagcactttctgcttacactattttagaagaagctcaataatgctgtaactttattttattattatttttattattattattttggagacggagccttgcaccgtcgcccaggctggagtgcagtggcgtgatcttggctcactgcaacctccgtctcccgggttcaagctttctcctgcctcagcctcccgaataggtgagactacaggcacacgccgccattcccggctcattttttgtattttagtagacacgggatttcaccatgttgccaggctggtctcaaactcccgagctcaggcaatccgcccacctcggcttcccaaagtgctaggattacaggcatgagccaccctgcctggccaaagttctaactttataatgctgaggggcaatcagctgtcctcagatttaaagacacaagtaagctcatgagcttatgtatagggacgtgaactcaccagctagaagaaacagaaattttaaaaaagaaaacagaaaaaaagtaaaatatgtattttataccatggctcaacccctttttattgactacttctctataccattcccaacaagcccctaccatgtgtgttaggtatacatgtgaacatcttcccttaactaaacaacataaattgcctttcagtcttatggaactcatgaagacctcctggggtaggctgggtgcagtggtgcatgcctgcaatcccaggactttgggaggccaaggcgggaggaccacttgagatcaggagttcaagaccagcctggccaatacagtgaaactccgtctctactaaaaatacaaaaattagctgggcacggttgtgcacacctgtactctcagttactccgggggctgaggtgagaagatcacttgggcccaggaggtagagactgcagtgagccaagatcgcaccactgcattccagcctgggcaacagagcgagactcgatccccacttcaaaaaaaaacaaaagaccttctggggtagacctgactttcattaattcactcaacaaatgcatagtgatgaggcactgttttaggcactgggagtacaacagacagaaaatatcttcgctttcttgggcctacattatagtgggagagacataaaaatgaaaataaatatacaataaaaagtttttggataactataagcattatgtgcctgggggccaggtggctaatttagattaaatgaccaaaagaggtctcattgaggaagtgatatccgaaagagacttgtatagccaacccttattataaatgaggcactgtatgtgtatgcattcaatcttcacaacactaagacgtatatttacctaaattatccataattttttacagttgaggaaactgagacactgagaggttaaatacttgatcctgggcagtgaagcttcagacctcatgcctctatggctctgtctgaacttgacaagaaacagccagccatgcagagggaacagcatatgcaagttaaaaagccatgaggcaggaatgagcttggtatcttgaaggaactaaatgaatggcatggcccgagaggaatggacataagtatattacataaacaactggatgccactgggaggttttacacaatggagtgatatgatctgatttatcatttttttttttttttgagacagagtctcactctgtcgcccaggctggagtgcagtggcgtgatctcggcttactgcagcctccacctcttgggttcaagcaattctctgcctcggcctcctgaatagctgggattgcaggtgcccaccgccacacctggctaatttttttgcatttttagtagagacgggctttcaccatcttggccagactggtactgaactcctgacctcgtgatccacccgcctcagcctcccaaagtgctgggattacaggcgtgagccaccacgcctggctgatttatctttttaaataatcattttgagggctgggcatggtggctcatgcctgtaatccaagcactttgggaggcccaaggctgatggatcacttgaggccaggagtttgagaccagcctggccaacatgttgaaacctcatctctagtaaaaatacaaacaattagcggagcatggtggcgagtgcctgcaatcccagctactagggatgctgaagcaggagaatcacttgaacccgcgaggcggaggttgcagtgagccgacatcacaccactgcaccctcgcttgggcaacagagcaagactccgtctcaaaaaataaataaaaataaataaataatcattttggcaggtgtgtagagaaagaatgacaagggagctgttcaccttagcgtgccacctgactctgagtttggtataatttactattctgcctggcccctaatgaaaatgtaataatgttgttttgacctgtgtcttaatatatcactgagtttggtgatgtgaccttgagtaagtcgctctgaataaacatttgttattattatctgtcctatcatgaagggtcttataagaaggtactctgaaaagtagagacattaactacaaggtaatattttcttgcaaacatttaacagaaatttgacaatttgccttaaactcctcccccacctccaaaaaggctgcttgaaaattaaagcactattttgacaagatgacttcattacattccttgaactttattcatgcccacaaacactacaggtatgctttccttatgattctcaatcctttttctatggtgttcaaatgtgttccaatttttaaaggtggaattctatttgtcttctagagttcttctctaagagactgagtgacggatatttagaagtccacacgctacgtataagagacctgaataaatttaaatatgatcatctgcacatattttgtgtattcacctacaaaattatgtaatctgttatgagacaattttcaagttaggaattcttcagtcgattctactcttacatcaaaactccatgcagcaatcagcctagacaacctgaaatgttgccaggccacggaaaacctgccacagtaagaaaatctaccacacagaaaatctacaataataattctgttcaggtatgaataatataaaaaaaactatttttgaaaatattaactttggaatgaaaaacttgttgagacaaacctcacctagcataaagacaggcagtagtttggggggaaaggaagacatttatagtattgtgctttgttttcacatgacaatggggcatttgaagaacagccctattttccagtgccagaagcctcatatccttaggtttctcaatgacatcctctccggatagatcaagaatatgctcctactttataaaatgaaccatgaatattttcctaaattcttgagcaaatatttttaaaatactggaaataaaatatcttgccataaaaaaagaacctgtcataattttgtaagagtatccaaacacagcaacacacactcagaggaaagtgtatattcaaggttgaaatgtgtctatgggtcaagaggtcaagcctaaagcttctaagcacctaccagagccacaatgaggaactctcaggacaatgcacacactgatgacagcactgtagcaccagtgaaaacactcaggccatcaacagcatgttcatgaattattcttccaattacactttaattataaaaactagcttattaattaaactaatctactctggtaagatcagttaccacacaaaagcaatggctcttcaagttaccttcatggaatacagtacagagtttgtgttaaaaatgcattttcacttacttgtggttattaaagactttgatcaaggcagaacctctggaaatacaacgaatcttgacaatttaaataaaaacagctccttagtcatggctcattattcttcctttcaaagcctcttgcttcaaacagtattactcttagccaattaatattctgtaaaaggtgctgagaatttttgatcaaataaaatgcaacagatattttaataccattttaagcccagcacaattatatatttaaagctttaaaacaatgagggaacacatagtacaggcaaacacatccattttccaaacaaagtaaataatacaactaaagtgttctctacatcactacaggagttcacacattacaactacatctaagtgcaattactgtaaattataaagtgctaagacacacagcagcactagtcagcagtcagtgctgtacattttgaaagcatctaatgtaggcagcaagcatgatgtggatagcaaaaaaagaaaaggtaaatgcacaccagcatgaaaatcttcaaataccttatgggtagcctatttaaaatagaaaggttctaaattaatcaaggagaaaggaagaatactagtgatccatattaaaagagaagaaccacctgaatgtaataactcagatgtcgcatataacatgaaaaaaataatacaataggaagagaattatgagcctttttatataccagactatcaataagaagcagaaaataaggtgggtgcaatggtacacaccagtagtcccaccagggacactgaggcagaaggatcatgtgagctcaggagtttgaggctgcagtgagctatgatcatgccactactctccagcctgagaccctgtctctgaaaaaagaagacagcagagagtagccattgagctgagaactgcaccatggcaaaagacatcaagaccaaaatcaagaactacaggactgcyccttttgacaggcgcttccccaaccagaaccagaccaggaatggctggcagaaatacctggacctccaccacttcaagaaggcaatgactgctaaaggaggtaatgyatggccgggtgcagtggctcacgcctgtaatcccagtactttgggaggccaaagctggtggattacttaaggtcaggagttcgagaccaacctggccaacatgatgaaaccctgtctctactaaaaatacaaaaattagttgggcacgatggcagctgcctgtaatctcagctactcaggaggctgaagcayttgaaactgagagatggagtttgccgtaagccgagattgcaccactgcagtccagcctgggtgacagggcaagactccataattaatacatacatacatacatacatacatacatacatacatacatacatacatacatacatcaagggggtgatgtctctgtttgtgaatggtaccagcatgtgtacaagtctctctgccctataccctgggcctcagcctgggatgaccatgggcagaaggcacatttcttgggaagatctgaactggctccaccccacctctgtccttctcccaggatggtaaagaagaacctgggtatatggtgatccctaccctgggaccctgaatcatgtcttaataataaaaattcactggaaaagtgagagaggcggggaagaaaactgcagcagcagggagtaaaagaacctcacttagatcattgtgacaggcctgggaggttgttgcccaatatcctctctcactccttcttcccagtaaaagaatacataagtkttagctaaatacatatcagaaggaagactatgttttccagcctcccttgcagctaagtggggtcatgtgactagttcaagccaaaggacatgaataaaagtattaggtgtgatttctaggaaatgtccttttaagaactgggggccaggcacggtggctcatgcctgtaatcccagcactttgggaggccgaggcgggtggatcacgaggtcaggagatcgagaccatccttgccaacacagtgaaaccctgtctctacttaaaaaaatacaaaaaattagcctggcatggtggcaagcacctgtagtcccagctactcgggaggctgaggcaggagaacggcatgaacccaggaggtggagcttgcagtgagctgggatcgtgccactgcactccagcctaggcgacagagcgagactctgtctcaaaaaaaaaaaaaaaaaaaaaaaaaaaagaattgggtacattattctttaggcacttctccctcctcctggctggaaatgtatatgagatggttggagtacaagcagcaaacttaagactacgaggaagaggccacatgttgagaatagcaaggcaacaaatacagaaaaaaactagttctctgatattgcagagcaccaaagcagtcctaggctatttctagacttctttatacaagacaaaaaatagacttatatcatttttaaagccagtgttattttactttctttggtcataaataatggaacataatcctaataaagaacatggagccaggagtggtggctcacacctgtaatcctagcattttgggaggccgatgtgagtggattgcttaagcccaggagtttgaaaccagcctgggcaacatagtgaatccctgtctctacaaaaaaaaaaaaaaaaaaaaaaaaaaaaaaaaattagctgggcatggtggtgtgcgcctgtagtcccagctactcaggaggttgaggcaggaggatcacctgagcccaggaaggtcaaggttgcagtaagccttgattgtgccactgcatagtatgggcgacaggagtgagaccctctctcaaaaaaaataaaataaaagaatgaagttagactgcctacctcacaccatacacaaacattatctcagaatggatcaacgatctaaatgtaagagatgaaaatgtaaaactcttacaagaaaatacaggtataatcttcatgaccttcaattaggcaacggcttcctaaataaaacaaagtacatggaaccaaaggaaaaaactagataaacaggaggtccagatatttctgtcaaaattttaaagttttgtgcatcaaaggataatatcaagaggtgaaaaagaaaactcacagatgagaaaaagtatttacaaatcatacaactgataagtgattaatatccagaatatataaagaactcttacaattcaaccacaataaggcaaccaaattttaaaatgggcaatggatttgaacatacacttctccaaagaaaatataaaaacagacaatataatcccggcactttgagaggccgaggtaagtcgatcacgagaccaggagattgagaccatcctgactaacatgatgaaaccccgtctctactaacaagaccaaaaaaaaaaagcagccgggcatggtggcaggtgcctgtagtcccagctactcaggaggctgaggcagaagaatggtgtgaacctgggaggcggagcttgcagtgagccgagatcacgccactgcactccagccagggcgacagagcaagactctgtcaaaaaaaaaaaaaaaaaaaaaaaaagaagagggacaataagcacttcaaaaaatgctcaacatcactagtcattaggaaataatgaaaaaaaaaacaaaacacagtgacatagcacttcacacccagtaggattggtaaaaccaaaaagtcagattataacaagtgatggtgaagatgcggacaaactggagttcacgtattatcccattcatataaagtctagaattgggacacatatagagaaataaagtagattagtagttctttggtttggggggaacagggagatagcagggtaaaagttaaatggtacaggttctctttgaggtgataaaaatgttctaaaataaactgtggcaatggttgtatatgtgaatatactaaaaaccatcaaattgtacactttgccaggtgcagaggtgcacatctatagtcccaggtacttgaaaggttgaggtctgagaatcaagagagctcaggagttcaaggctacagtttgctataatcatgcctatgaagagccactgtaatccagcctgggcaacacaatgaaaccctatctcttaaaaaaaaaaaaaatccatacacctgaaatggattaactgtgtagtctgtgaattttatctcagtaaagctgtttttttaaaaaaggaaatgaagtagttacacttgcgtattactccattttcgtgctgctgataaagacatacctgagactgggaagaaaagaggtttaacggacttacagttccacattgctagggaaacctcacaatcacagcagaaggcaacgagaagcaagtcgcgtcttacatggatggcagcaggcaaagagagagcttgtgcagggaaactcccgtttctaaaaccatcagctctcatgagactcattcattatcatgagaatagcacaggaaagacccgccacccctgtaattcaatcacttcccaccgggttcctcccacaacatgtgagaattgtaggagttacaattcaagatgagacttgggtggcgacacagccaaaccataacaatttgctataacatggatgagccctgaaagcactatgctaactgaaagaagccagacacaaaagaccacatattgtattatccaatttatatgaaacgtccagaatgggtaaatccacagagatagaaagtagattagtggttacctggtgttagggagagagagaaaagggagagggaaggagtatgaagtttctttttgggatgatgaaaatgttctggaattggacagtggtggcagttgcacaatcttgcgaaaatactggaaaccactgaattgtatttttggtcttttttttgttttgctttgctttttgagactgaatcttgctctgtcacccaggctggagtgcagtggcactatctcagctcactgcaacctctgcctcccaggttcaagcaattctcctgcctcagcctcccaagtagctgggactacaggtatatgccaccacacctggctaatttttgtatttttagtagagacagggttttaccatgttggccaggctggtctcaaactcctgaccttgagtgatctgcctgccttagcctcccaaagtgatgggattacaggcatgaaccaccgtgcctggctgaattatgtacttctgaaaggtgaattttataatatgtgatttatatctcaacttttaagaacgagagccaggcacagaatcccatacctgtaattccagaactttgggaggccaaggcaggagaatcatttgagcccaggaattcaagaccagactgggtaacatagagaggccctgtgtctttaaaaaaaaaaaagatattcagtagaagattcagatttaataaatattttcgctgggtgtgatggctcatgcctgtaatcccagaactttgggaggctgaggcaggtggatcacttgaagccaggagtttgagacctatttaaaaataataatatttttactactgcatcaaggatatttttattttttttatagagatgtgaatctcactatgttgcccaggctggtctcgaattcatgggctcaaacaatcctcctgccttggcctcccaaaatcctgggattacagggataagccactatgacaggtctctgcatcagggacatttgtaagttaaactattctttttcttttcctgtgagtgcatggtggtaaaaacaaacaatgaccatgatacagtctggtgccactctctcaacttgtgctaaggtgccagcagtcttatcagtcattgcttttgccatcatcagtgaaaaaagcagtaacattttaacattatcataaaaacacagttagccctctgtatccattggttctgcttctgtgtattcaaccaaccacggattgaaaatattcatggaaaaaagtgaatggctgcatctatactgaacatttacagactttctgttcttaccattattccccaaacaatacagtataacaactacagcattacactgcattagttattattattattattttttttttttgagatggagccttgctctgtcacccaggctggagtgcagtggcgtgatctcggctcactgcaacctctgcctcctgggttcaagctattctcgtgcctcagcctcctgagtagctgggagtacaggcatgcaccaccacgccggctgatttttgtactttttggtagagacggggtttcacatgttgtccaggctggtctccaacacctggcctcaagagattcacccgcctcagcctcccaaagtgctgggattatagatgttagccaccatgcctggcttgtattagttattataaataatctagagatgatgtgaagtatatgggaggatgtaaattatatgcaaatactacacctttttatataagggacttcagctccatggattttggtacccacagcaggggtactggaaccaatcctccatgaatactgatgaacgactacagttgtgaacttgtgataaccaaaagtgaaatcagggaccaccagcagtccatctgcagactccactttgtgaactcctggactagactataagctagaaataggaatccaatttatatttacacacgaggcagtattgtgtgttagaaaagtagcatgggcttaggttcaaattccagaactgccatttaggtgatgagagcttaactcctccatgcctaagtttcctgtggtataaaatgaggatcgtacctactaacaaatttactatacagattaaatgagatgaagatctaaaatttaacaggtgttcaatagatgttaactcctttccctgttttgttctcaaccagctcgttcagccccttgcatagagaagatactcaaacgctcagtaaatatttgtagaatttaattagtacctcacagagatctacaaaagtcaaagttctaagataaaatataaatgctagatttagatataaaatattgagatatgctcaggcatttctcagaaaaatattatactcagattaaattttaaattaaaaaaatcttttataaaatgagtcaaatatttaaaaaattatttgctttccaggtgagtagcagtaaaaagtgaaatggtatatgttaaaagacacactgttccacatctttgaatcaaaaggctttcacaacctgtatatctccatagctcaactatttgaaatttaggtgatataaacaatccatggtgacttttcttcagccaatatggtgatgaacagcaccattattttagtcaaagcatctgattttacaagccaacaccaccacttactaccagggtatatgaccataggttattaggttggtgcaaaagtaattgtggttttttactttcaatagcaaaactgcaattatttttttgccaacctaatatttatcccgatgagtataacaacaactctcacaagttaactgtgaggactgagtgacatactacatgagaagcactaacaatgctaagacagtaagagctcaacaaacactaagcatttttttctgatttaaatatattcaactgatatttttgtagtattcttacatagcatcttggcaccatatgtatagatgtaaatttcttttttttttttttttttgagacggagtcttgttctgtctcccaggctggagtacagtggcatgatctcggctcactgcaacctccaccccgtgggttcaagcaattctcctgcctcagcctcccaagtagctgggattacaggtgcgcgccaccacgctcagctaatttttttttatttttagtacagacggggttttgccatgttggccaggct

SEQ ID NO: 93979 - DNA, 55117 bp, Homo sapiens
ccagtgcactcatgttcttggggttgcaccgggactatccacagatgtttcacattgatctagctgttccagtgcaacccttactcccagttatacaagttctctttaaaataagttttggatctcatgatccaatgtattttagaatgtttctttgttataactttttacaacatgattatgatgacatattgttagatatttctattgttcctggaggctaattattattttctggttttttctctgttttttctttatagtaacaaacttttttttttctctttacagtgccattgataatagtaaactcaattgcaattgtgttacttttattatttggatgaatatcagtggagaaaatggagactcagaagaggacatgccagtagaagttattactttggtcattattggaatatttatatcttagctggctgaccttgcacttgtcaaaaatgtaaagctgaaaataaaaccagggtttctatttatctgtttttttttttaatgttgcacttgtagtttcattacaaaagatcagatcatgaaaggcagtaactctccaggactggaatatctgattgctcagtgttaatagtagttcatgctgtggtgagattgttaaaagggtgcaagactgttgcttctctttttttagatatttttctatctctcacttctcagggatgaaattctttttcaaagttttgaagttccttgcaacttagccatgatgtgagtggttatccctagataaaattaaaaggatttttaaaaagtaattactgcacataaaatgataaataggtaatttgaataattttattttaagctccttggttaattattttgtctattgtctcagctataaattcaaatttatacatactattgagtattaatattctctgatttcagggagaattctgtcagtcacatgatgattatgtttttgtttaacattctttccatgcacttgttattttattaatttgcctgaatgatgagaccagaccagtgtctacagattttcattgtcagaaaaatctataagtctgccctttttacaatgatgatttaaaaaaaacaacagcgtaaatattagcccacaagagcagtcctaaacaatcacaattacactgtactacccaagaagactgtttattgtgaagcatttacctttcaaaaaatcattacatttctatttcttggtggagcagcacattgtggagtgtgattcttaattcttcattgagtttgtcaataggacattgatgctggataggttgtcttttgtttttatgtctcagaccatcttgtgagattgtttgcctatctcataatacagttttatgcagaaaggttgaaactatgtaaatggtttttatggaaattatcagttacaayattttaaaggtgtagaatggcatctttgtttataggagaacatttgtaaataaagttaaatttctaagtcaagcacttgtttttgtaccttagtataaacctgtcagtgttaactgcattaatctccawtttgggtgaacacctcttattatatgttctttgctgtaaaattgccgagtatagagttaatgaaagtaaatatttacatgtatttttttttcttcagtgaattaactgaattgctgacatacatccagaagactcatgagcaccttttatttcatgacttcagttacttctaaaactatggagcaggtattaagtaccttttggcctttcctaagttagagatcagtgatctttggactataggcttgcagctagtccaaggaaagtaccaaggattcttagttgattacttggctcatgtgaatgactaatttggtacttagaggccgtgttcttttagccttacaaagaactgatgcctgagttcaagtttgagctactgaaaagattcaaaagaagcagttacttgagggcaggcccatttccccatatggtatgagcagtacaaaattttttaaaatgaaagaaaagagagaccttgatctgatgttatttttcatataagacattacagcataccttcatcttaattcagtgttgggattttgtccaaatattccatcagggagcagtcacagaagggccaggatcaaagtattctgtagccaagtagttctgaggaaagtgaagcactgaactgaacatcaaaatatgtcatatctggaggccacttcataattccagtttgtggctgaagaggggtctgtaagctttcactggtcagccctggtttccccagagcagttgtgattcagtaaacagagtgtgttattttagtagacagtaacttaagtgcctgttggcctgcccatgtcctcccctttatctattaccaggattaacaatttgtgatgattctggactccaaataccgatgatgtttatagtccttatgtattctggccctgtgtttgcatgtctctgaactgtgcgaaggttcttggctctagtctgtagatattaaccaaattcatcgctaatcaagtacagtggttttcaaacttttatagttaacagcagaaccagattttcaaaggaattctgacacagaactgtaacattcccgtatctaaaccagatgagagtaggtccatttatttgtttttagttgaagtagagctgggattcaaaggctcactattcagcctccactgcactcttgtcaggcttcccaaggcatttccataaaaccctaaattttcaaaaatatagctaaaaagtatcttataaaaatccctgctttagccataaaaaagaattagataataccttctgtgggaacatggatggagctggaagccatcatccttaacaaactaatgtaggaacagaaaaccaaataccacatgttattacttataagtgggagctaaatgataagacctcatggacataaggagggggacaacagacactgggggctatttgagggtggagggtgagaaagagtgccagaaaaattactgggtactaggcttagcacctggataacgaaataatctgtgccaaacccccgtgacacaagtttacctatttaacaaatgtactgtacccctaaaagttaaaaaagtaaaaatataaaaaaataaaatccctgctttagggagggtgggagggggtgagggaaacagaaactacatactgagtacaatgtacagtagtccagtgatgggtgcactaaaatttcagactttacaccactatacaattcatccatgtaaccagaaaccacttgtacccctaaagctattgaaataaaaagctaaatgagttcccccaccttcctctccccatcaaaatccttgctttagatacaataagagtaggcaatctgtgttctatatgtgttagatgtgtattactggtgaaatgacaagagaaagcaagatatttgactagtaaaaagactaggaggcaagatatttctaatatatcaagcaaaccttttaccatgtgactgaaagcaaataaacttcctaagacctcagtagtttttggttgtcctatctgtaaaattggtcaataaccttcagaacagaagtctggtccagatatatatatatatcttttccagatcactaatgtttgtatctagatgtgcttcaaccaaagagatgttctccttaagtaaaatgtttcttatgaagcaaatcactttctcattgatttattagtttctaagttattaccaatgtaacattttgaggctgggcatggtggcttacgcctgtaatcccaacattttgggaggctgaggcaggcagatcacttcaggtcaggagtttgagaccagcctggccaacatggcaaaaccctgtctctattaaaagacaaaagttagtcgggtgtggtggcacatgcctgtgattccagctacttgggaggctgaggcatgagaatcgcttgaacccgggaggcagaggttgcagtgagctgagattgtgccactgcactccagcctggctacacagtgagactccgtctcaaaacaacaaaaataacattttgataccaatggtaatggaattcttctttgctaagatttctcttggcccctgatttttcattagaagtcaaatattgtgaaaacattcgatgcaaggacctgggacacagtgggctatgtccaagggtatcaacgatcaagataagtttttcctactgtttttgttccagttcagatactgctttatggcttcactcctttgggttttttgcccccccgctccttttttttttttttttttctgaatccagtccctccctttggaggggctgaatttcttcttagcttgcctttcatcaagtagatccatttggagaggagaaagccattagtcctgtcccatgattccacataatctgaatgaggccaggcattggtgcccgcgcctgtaatcccagcactttgggaggctgaggtggaagaattgctttaacccaggagtttgagaccagcctgggcaacatcgtgggaccccaccctgtctacaaaaatcaaaattagccagttgtggtggtgtgcacctgtggtcccagctgtctggggaggctgaggcaggaggatcccttgagcctgggaagtcatggctgcagtgagccatgattgtgccactgcactccatcctgggtgacagagtgaggccctgtctccaaaaaaaaaaaaaaatcagttacactacccaattgcctagtcttggagcctgataattgatgccttctccctaaccccaatctaatctgtcaccagtttctgttttgcctcctatgaatttatcctctttgctttgtttccacacattctagttcaagtatctctcttgtggccctgcagtgggtctcttatctggtctcacccattctggcatctctcctatctattcatactgcaggcagaggaagcatttagaaaaatacacttcttatattacccacttaaaatcctttggtgatgtcttaatctggtcaaagacagctggctcataaggggaaactaggaccaaatcctttttccttcaaccaattagaccctcacacagaaaacttaaacttagcatatatgagtaagacaaaaaaacttcagatccagtggggaggaaaagcagatggctcctagtccaagggacagaatgggtcacagctcctaacagggctgactgcagccttgggtagtgggggtgttagattgtggcatacgggtggcatatatgggtccctagtcaaggacagagcagtggttttatcaaggggtataacccttgtataaggtgtaacccgagtgagtatcctattatgtcaacacggctccagaaagttgttcagtcattttcatagtgagtgcataagagtgacttttctgtactctattattcaggtccacataacttacctggatcaagaggagacaggtagagacccccacgagtgtggcagcgggttagggagggaggtggttctgggtgtaccaagatagagctcccgtggaagaggaaggcacggcccgtagtggctctaatcgggagagaagagggaaaggagggacgtcgctgcccgagggagtagttaatggaggaagcaagaggtgccaggtactattcaagtagctaagggggaaatgacgacttctgagattgggttgtctagtaaagtatgacttcttagttaaacctcgagagtggacaagtggtagaggaagggaggggtgaaggcaaagaacgctactcagtaacgctcggttcagcagtggtgctgtggactggaaaacagctaccgaagaaaggcaggggattatttttcctcgtgcatcccggcccaggaggccgcgcccttgggaaagcgggtctccagaagggcctagctttccgtcagcggcggtgcagacagaggacaacacggcgcggtagctgcaccgcctcggcggaaatcccgggcgaaggggtggggcggagccgggaaatccggggcttccggcgcggccagggccyaacttccggcgtccgtcgggcagcagcggggctgtctatcccggctgaggacccgcggccagtgcgggtggctggctttgccattagcgggggcctttcctgaggacggcgtacggagtgtgggtgagaagccgctgtaggactgaagaggaagaagcgcaattggggccgggaggctgcagattttgtgacagggttcgggaactactagtggcgcccccaggccgcccctcctctcgagccgggccgtgcgctcttgctctgtgcgcattccctgttttccgcgtcggaaccgccctctttgcagtggccccgcgcgtgcgcatagctgggcgcgaggcgcgctgtgggtctctgcggggcggatcgtgaagctagtgtgtcagtcattcctcgaagcgtgctcttgggctgtattttggagctagcgtccctcctggtcagtttggcgtttttaaggccctggtacttggtttagaaccgagtgcagtgaccagtcttgaggccccttcccagccaagagatggggggatggaagttgagttggtgctgaaagagtttgttgttggggccttccagctgtggacaccgggattcatgagttaattcacgatctttattgaacgcctaaataacccagtgggaaaggcaacacagtcccttatgcacagagcttaacagtttagtaggagaggcgcgggctggtaaccaggacagtggtaaatgtagtaggaccacaggtggctcctagcctaactctgggagaaaaggagttggacccagaggaggcacgccagaggaagtgatggttatcagagactgagggctaaagggattggccaggagatgagggtgtagaggggcccgagtagttgcagacaaaagtcccgcaacgagggaggcaaagtgtagagctcttggccgcctgcagtaccatggaacttgggtgctagtagagacaaatgtgttggagagggtaaaccaggactctgtccaccagtgttcattgttcagactttatccagaggtcagcggggagtcactggaagagttttaactggggagtggctgaataataccgtcatttattgaatgcctacagtggttccagaaaagtctggaaccatatagggaaggaaagaaaatttgtacttcccaggggttttaggaggcatgttttgtagcgccccaatttcccaagggaaaatttgtattaaaatctcttgttgtaagtatgcaagttttgaataatatgccataatatatatttagatgtgttttctcaaatcctcaagttatactaatgctttagaactttgcatcatgtgtatcctgtgatttttgtagcccttgatatatccataatgttccctccttgcttctctctcccagccctccacatacataacscaacctttctctgagcgggacacaattcacaattctttataggtattactttctttaatcctcttatcaaccattagagttgtgttattatttctayattagcaatgaagaaactgaggcaaaaaggttaagaaggttgcccaggttcacccagctagtgagtggagatgtatacccaggctataaatttatacaactcctttgttcttgtccttaaccactgcactgttgcattgtagggaataatttagggctggtaataggagatgcaaagtagagaggacaattaagaagttgtttaaatagtctagatgagagttgatttccaacttcaaaaaggtagttttaaaaacgatgaagagaagtaagtggatataagactgtaaaggaagtagaactgacataatttggtgtctggattgatggtgctgccaaccactcataaggatggctgggaaagagcacctttgagggtgaaaggacttggattgagatgccccagtgatattcaagcccagatgtcctctgaagtatctggaagttctcctcttgggatgagagaatatggcttttcttctttgcattgaatatgtaccactgtcagtggtttatggctcttctaaggggtgtcccatgtaatttgttccgattatgggagatgggtatggactcaagataaacaaaatcaggcactacctttgaagcctttatagttattttgagggttatattagtattttacaattacattttatcaaataccagcttgtagttcaggtaacgagtattatacatgttcagacaaggcttggtggctcatacctgtaatcccagcactttgggagcccaaggcggatggatcacttgaactcaccagttcgagaccatcctgggcaacgtggtgaaaccccgtctctactaaaagtacaaaaattaggtgggcgtggtggtgcacacctgtggttccagctacttgggaggcggaggtgggaggatggcttgagccggggaggcagaggttgcagtgagctgagagatagtgccactgcactccagcctaggagatagagtcagaccttgtctccaaaaaaaaaaaaaaagaaagaaaaaacaaagttttggacaagaagagaggtcatagtgatcaagtgatcaagttagtgggactaactgaagaagtaagtatattttgaggtatgagtggggcacctcaattttattctaggccttagtcagtcactctcaaatatgtggtgctccagaagagcattttagagtttaaaaggtacgttctatggaactggtgagagcaaagaatataggcttttaaaatgttttggtaacattaagcctgtgtggatgcttcagtaaggattaaaatgataaatatgtattatgacagttccttggctccaagtaaatagtacagttcttactttcattgcttttctggtcttgttcatatttgttctttaatcaccttcagaggtaacgtttcttcttgaatattagatatctcccataaaagctgggttttgagagaagcaattttagattcctctgtatatatgaaaagaaaatgcctttttttggtccattcttttgtagtgtacttcaaataattttttaactattacacatccaaatggaatccctaggaacggtctagtcttttgatgaacaagctgttttctgtctcagggaggtaatagttgatgctcttgcttatataatccttcaattcaaggtcacaataaagatcagaaatagaataacatgtggactattagagaaggtaggattttgcagttgaaatttgattaaccacagctcttaatatattttttaacctctgcagtcttctttttccctctttcatcagatacattatgaaagacaaacagaatcggggatttacttaaaattcaaaatgccttgaaggtggaggcttttatgctgagtgtatagtaattgtctggactactggactaatttagttttttataactattaaatgtatgagaaaaaactgactaaaatataagactcattttttattgtgcaatatatcatctatagaagagtatacaaaacatatatgtttaaaatgattatagtataattaaaagcacccatattctcattgtctaggttaagaagtagagtattgccagaccttagaggctccctttgcgctcctcttggtttgcatctgcttcctgtcctctggagggtaatcattatccccactcttgtggtaatcattcccttgcttctctttacagttttatcacctatgtatgcatctgtatttttgagtactataatatgaaaccatactgtatatattcttttttgacttgcttttttcaccctctagtagatttccgagagttgtgtaaggtgatgtgtrtgaatgtaagttctttctactgccatttttttctgtgtgtaaatataccacaacttatttatccattctgttgttgatggacatttgtattgtttccattttctggctgttacaaatggtgctgctatagacgtctttgttcatgtatcatggtacactgtgaaagaatctctcaaaggtatacttggaagtgccgaactgccagattgtaggatatggtgatgccagactgattccaaaatgcttgtacaagtatattctttcactagcagcatgtgggaattgctgttgacagcctttggtgtttgcagacttaaattttgcccatctgtaggttggtgcattgatctcactgtgcttgaaatttgcattttcctgattaccartgagctttgagtatcttcatttatttgctgttcagatttgctctttttttttttttttttttgagacacattcttgctctgtcgcccaggctgaagtgcaatggtgtgatctcggcctcactgcaacctctgcctcccaggtttaagcgattctccttcctcagcctcccgagtagctgggattacaggtgcctgccaccatgcccagctaattttggtatttgtagagacagggtttcaccatgttgactaggctggtcttgaatgcctgacctagggtcatccacccgccttggcttcccaaactgctgagattacagacatgagccactgtgcccggccagatttgctcttttgtaaaggctacgttaagatcttatgcagtttttctattgggttgttcatctttttcttaatgtttatactttatacttcctggaatctcgtcttttcccacatgtgttagaaaaataagttctttttctgtattttcactctctttgtggtgcttttgaaatatagttgaatttatctgtcttttcttcaatggtttgtgctttttatgtctcattttagaaagccttttctgtcctcaagtcatgaagatactctcctatctaaaagttttagttttgccttaaacatgtggttgtttaatctccttggaaaagaaaattgttgtgtatagtgtgatgtgggagtccaatttcattttttctcatgtggatattccatggttccaacaccatattattgatcattttattttttctttactaatctgaaacactacttctatcatatatgaattttctacacatattgggayctttttctgtattttctgttccattgatcagttcgtctccatatgtactaataccacaccattttaattaattacaagacctcattaagtaagtctggatattaggtaaagcaacgcctactttcttgttcttctttggtcttggccgaagtgtcttggctatacttggccatttgtactggtgtaaacattttagtatcagcttatcaaattcacaagacactttttgggatattgattggagttgcattgaatctgagtctaaatgttgctcctttgaaagcaatttgtcttttcccttggctgctttcaagatcttctctttgccattggcgtatagcaagggtttagatgtggatttattttcatttatcttgcttagaattcgttgggccttctgaatttgcacactgatagtctttcatgtgttttctcctcatatttttgatcttgccttttgttccttacacatgtaggcattatgataattacattagaagaataagaagcccttatagggctgcttatgcagtctgttgtttgtgtaggttctcccttaccatggcttgtttccttaggttacttgctcatcattcttataatttgatttctttgtgttgtttttttttctttttttcttttcttttctttttttttttttttgagacagggtcttgctctgttgctcaagctggaatgcagtggtgctatcatagctctttgtggccttgaactcctgagcccaagcagtccctcccaccttagcctcccaagtagctaggactacaggcccatgctaccacgcttggctatttgattttatttatgggatttctttgctgtttgggctgaaaactagtattttgagggagggtttatatttgctgtagccaggcacctgctagtcaaggtcacgctaattacaatcttgaagtttttctgaggcttatcttaggtaatgtgaatttggtctgcaaattgggtccagcactggtttatggttccaaattctctgcagcactttatacctaccacccctttgggccatgtttcaaagcagttgattttcttgtagtcaactgagacaaggtagagagggagtgcctgggatagtttatttctggctcacccttacagtgaggtcttggtttttaggtcagaggatctatctcttcagatgggctctgagtttatcttttattccctgaagaggcccatggggaaaaagataacttaaggtcacatagtgtgacagatacgtttggagccaaaacaggccacagggttctgctcatctcctgagtttcttgcttttattcagatctaacaattctttttttccttgcaccttgtggcttacacacatgcgcatgcgtgcagacgtgcacacacacatgtgtataattttttatctagtattgttaggctttatttggagagttaatttgattcttagcctgctatattatggaagcccaagtttaaagtgagttttaaaaataagcataccagagtttattcatcaataaatgtttactctttcaaagtagtcagggtaggaaacgataagyttctacattgctcaagatctttttggactcctattttggaattgctttctgagctagtacatgttctttgggatatttttattggttacaatttgtatgctttaaagatggatataattttgaaagtgtcagaataaagcctgctgaatgagatgggtagtcaaggagagtaatgccacttggagttaaaaataaaatggagccattggttaatgaggctgattttcatgtatggctcatatgctaacattgatggtaattcctaaagagaaaaatcccaaaacgttttgagtaatagttatttgaaataaacatttcttatcatttctagttaccttcagttaactggaaaaataactctactagaacactgcattatttcttaagcatcatgagtagttgtgtctttagtgtgatgaggaaatattagtagaatacaaatatatatatatgtgtgtgttttagggatatagtctcactgtgttgccctgactgcatggtcatagcccactgcagccccatactcctgggcttacgcaatcccagtagctgagactacaggcacacgccaccatgcttggctactttttaatttattttttatagagatgggggtctcgctttatggcccaggctggtctcgaactcctggattcaagcaatcctcctacctcagccacccaaagtgctgggattacaggtgcgagccactgtacctggccaacaatcttcttttaaaagagaaaaatagcttcttggacacrtgcttctaaattttttcattaaatttttattcctgttgtatatctaattttatacattattaataacattatttccattaatataacaggtttattataaataatgtgccaaagatctatttaatatttgtgtggtatgtctggtatattctgtgtagggaggtaaattctgtttcatttaagagtagtttgtcaggcgcattgaacctttagaaaaagttagaaggcaaatttagtaacaaatctttgttagtaatttcttcatctgagcaccatcattctcaagagaaggtaatatctatatagacattatctggaccttggtyttcccaactaaggtgtaaaaccagtgtgtgtagaaaggggtgaggggtggttcgagagcagataatcgaagatcctgtgtagctgtaatgttttttttgttcattacttaaatatttatggtctgttctcttattcttatataatcacatgtattttcctcattatttttctttctcctcaaagcccacttttgccctcacacttctaaatagaagcatatacaagttttttctttatgagaacgtatgtactcacattctgtgaccatatggggcataatgttatgtgtatgtctctgtaagtggaattaagggtgtttagcttgctggttttagggttttttggggtttttttgccactcttctccagtaggaatctcctcccctagcacagggtcaataaactttttctgtaaagggccagatagtaaggctttgcaggccaaaaagtaaaattgagaatattaggtagatatctagttaacaggaaagaaaatttttttctacaaacttttttttttttatgaaatgaaaaacatttatttatggaactaaaactttaatttcatattattttaaggtatcacaaaatattattcttttgatttctttcccaatcatctaaaaatctgtactagttcattctcacgctgctgtaaggacatacccaagactgcgtaatttatacaggaaagatgtttaatggactcacaattccacattgctggggaggcctcacaatcatggcataaggcraaggagtaacaaaggcatgtcttacatgctggcaggcaagagagcatgtgtggggaactgctctttattaaaccatcaaatcttgggagattttctcactatcactagaacaccatgggagaacccacccccatgattcaattacctcccattgggtccctcccacgacacgtgggaattatgggagctacgattcaagatgagattcgagtgggaacacagccaaaccatatcaaaatgtaatcaattatcagcttacaggaaaagacaagatgagtctggagcatcatgtagttccaaaagcaaagaagtgctcaaaaaacaaaaggatggaggcacaggagccaacctgagagagctctcaatggccaaagctaaaacaattttagcaacaaactaaatgacatagtattagcttatggcacaaagaatagaataaatatctgtgagcccatactgattacataaaataaatgattgagtaaatcaatggagaacaagtctttctcacagaagaatttgaaataatatatgaggacactcctstttttagaaggtggagtttagttcctccctaccctctttaatgactcagccccaaagaataaaatgtgaaagggaaaaatactgaatgtggaaaaacctggcaaatatcataatttattaaactagccttctgttgatggtcatttaggttgtttcttatcttttagtatttgaatctagcagtaagtaaaaaaagataatatatcaggactgcattggatttgtgcaagattgtcttaacattaattgaccccattgacagcttaaggggaaaaaatgtgatcatctcattggatacagaaaaagtagtaggtaaaatccaatagccatttatgacaaaaatttttagcaaactgggaatagaagggaactttcttaaatggctgaaatatcagcagagttctacagtaagtttacttaatgtttaaatactaaaagcattcctttcaagaacagaataaggatgcatgctatcactacttctattcaattatggagttcctaactagaataataaaacagaaaataagaaaaatagaaaaaattatcacttgtggttggtaattattgtctacatagaaaattctctatgtagacaataattttctatgtagataataactaccaactacaagtgacaattttgtttctatttttcttattttagaattaagaaagtttggggccaggtgtagtggctcacacctgtaatctcagcactttggaaggccaaggtgggaggatcacttgagcttaggagttggagaccagcctgagagacataggaagaccccatctttacagaaaaaataaattagccaggcgtggtggtgcacacctgtggaaacagctacttgggaggccgatgtgagaggattgcttgagcatgggcagtcgaggctgcagtgagctgtgatcatgcaactgcactccagcctgggtgacagaacaaggccctgtctcaaaaaaaaagagtttggaatggttaaaggatataagacaaaaacaacaataacaacaaaaaatgtattttaatacaccaacaccaaactgttagaaaagtaatttaaaataatttaatatagcaatgatagagttgtgtctacaaatatatgcaagccatttatgtagatatttataaaactaaaaaaattatgtgaatggagagatacagtatgttgatggataggatggcaatataataatgatcttagttgtcctgatattgctctgtagattaaatgtagttctagtcagaatcccaaaaggtggatcttggttttgcttttggtagaatataaaaggcaccaacgtggctgaatctcagaaatacaatgttgagcaaaataaatcacgaaaattgtgaaagaatgtgtacattgtgatttcatttttgtaacattctaaaatggtaaaactaagcaattggtaaaaaatatgaagaaaagaaagaaarttattatcacaaattaattgtaccagttacttccaggaaatttaactgaccaggttcttacaggaggcttcagcaatattgccattagttctgttcttaagttggggatgaggtagatacatggaatttcattttgtataactattaccattctggaagaaaacattcaaactgtttttcatctgctgtcacactaacacaacaacagtcaatacagaagacttctgtgaccccaaaatatgtggaggtttttccccatcagcaagcaagcaatcagttctgcagcagataccagttggttgtcctccaattcagttccaacactgtctacctggagatagtgtcagatcccacaggttgagggcttagtctccaagactgcctcctccattttcagacaccagtcacgagtcctgacctgtggaacttcttactgactggcttcaggttgaggttttcacatgtcccactttgggtttgattagtttactagcacagctcaccaaattcagggaaacacttacttacatttatcaatgtactacaaaggattttttttttttttttttttttttttttgrgacagagtctcgctctgtcacccaggctggagtgcagtggcacgatcttggctcactgcaagctccgcctcccaggttcacaccattctcctgcctcagcctcctgagtagytgggactacacgcgccgccaccacgcccagctaatttttttttttttgtattttttagtagagatggggtttcaccatgttagccaggatggtctcgatctcckgacctcgtgatccacccacctcagcctcccaaagtgctgggattacaggcgtgagccaccgtgcccggccaacaaaggatttttttgaaggatacaaattaacagccaaatgaagagatacatagggcaaggtctggaagagtccccagtgagagcttctgtccccatggagttagggtgtgccaccctcacagcatgtgggtgcattcttgttcaccctcctatcagcctccatgtgatcagctccccaaaagcccccatggagccctatcaatggagacttcattggataggtatgattgaagtatgcgcaactgtgtcaaaatgtgattgaatgtaaagggtatgatctaaacccagtaaggcctgtttagattgttcttgacccctgtgcagcattccttcctccaggatatgagacagaacctctctggaatgagggtcttttgacccacaatcagatgagagttctgccttgggcagatgaaaggtgggcaggagaaagtcagagagattctgtttacttcaacaaagkctatgggagttatgagccaggaatcgtggamaaaatcattttgtatatttatatatcacactgttattaggtatgaaaacatccttctttcgcccactttgataagaaatctcctattaacttatttttctcaaactttttatgttgaaagtttgtaatagtgcagtaaaaaccatatattcttcacctgaagtcactaattgttaattcttgctccattggctttatattactctcatgcattgcatttagatgccatgtctcttcagactcctttaatttgatacagttcctcacccagccaattgttttgtacaattttctttagttcgaattgcctgactttttccttatgcttcaacttgggttgaacatttaagtaggaatcctgcacaggtgatgttgtctctctcaggaagcacatgatgttggtttgtcccattactaatggtgttaatttgatcatttgatttaaggtgtatctggcaggtttttccactgtaaaggaatcttttttttttttttttttttttttttttgcgacaraatctcacactatcgcccaggctggagtgcagkggtgcgatctcggctcactgcaacctccacttcccgggttcaagtgattctcctgcctcattctcagcctccctagtagctgggattacaggcaactgccaccatgcccagctaatttttgtatttttagtagagatgcagagacgcggttttaccacgctggtctcgaactcctgacctcaagtgatccgcccgcgtyggccttcccaaaagtgctaagccactgcacccagccctgttcttcttttttttttttccaacaggaagtttatttaaacaccaagatgcttgacttgaagggaaaaataggatttttttttttgagtaatttatccctgcttaaagacagattgccctatacgtaacagctaygcagaaaaagttataaaattgtctttggttttacattgataaatgaaaaacattaaaattctccaattgaacaagatatgcagggatttttatggggtttttgttgttgttgttgttaaaacagagcaaaataacttactgaaatgtaaagatagctgaatgaacatgccactaatggagaaagggtattttcacagaatcagtatttttccccatcccatctccacttgatgtcaatcagaacataccattggctatttagttaaaaaaatgaaatatgcttgtgcacatataccagttactttgtgtactgtaaaggaatggggaaagaggaaaggaaagaatagagaaaactagtcatcaggatgtggtggaatcaaatcgccattttctgattgagaatgtaagcttggtctgtaagaacagaattctggagtaaagaagcaggttcccttttcgctagacacctcgtctgctactggaacacatccattgtatcttcagcctccatttccaaatgtgcaggtatgtctgtttcagtgattgattgcccatcaaattggaatctcatctgcctcattgacaatccctgtcattcacaatagtctttcattagtttaccaagtggtgtatgcctcttaatcttaaactgcaccacagaaccattctgccctgccaccttcaagttaatatgatcgttgttctcagttttgacttcttccttgggctttttgttggccatggtgactgccagagtctcctcagctgccacttcacaaaagaggtaccatgtctgcaccaagagtggcaaaaaggaggaggtggcagtggtggaygagggagagccacatattctgtttcaggttacagcagcaaagaagggcgatgagaatatttgcattatacataaccaaagatgaagaagactctgctaatgatttagtcctttcatccacccattctttggagtacattattctcaggyttaaaaataaaataaatgaatgaattgttcaccagagttctttttaaaaacctgaaagtaaatagtgatacctctgtaagcgttttgcttcctatagttttaattcaagtgttttttttttttwaaaaaaaacctaagtattgtaaaaggtttatggatcaaattttggatttgtaatttttaaaaccagttttctccaaaatggaagcagcttaacactaagcaggatctttctggatatgagtgatatttttgaatacttaccagtttttaattgtccattgtttcctaaactgtatttttaatttcatttgctctctcctagggaatgaaggatggcagcatgccgtgcattaaaasctgttttggtagatctcagtggcacacttcacattgaagatgcagctgtgccaggcgcacaggaagctcttaaaaggcaagctatcctccaggttcagctgacaaatatgtttgtaagtgccattttaccacggcagatcattagctaaatggatggccttaagatggcattttaccatcttaaccatatataggaactgccttgggtttagctagaagatgtatgcattacaatttcttccaaacattgttttctaagcctttattaggtttggccttttgatccagtctttttgttctatatgtatgtcattttctaagtcagtaatataaatgttggaatgacaactcaagagtctacaatgtggaataaatatcattggaaaaaatcacaaatgaatcctggaatcacaaaataaaacacacacagacaggcataatgctgctctttcttgttttacctaggatctaacatcgattgtgcaactgctcaaataaagtttagctaaagaacttgaaatttttgtgttatttccatcaactaaacacttttaaaggctaaggactgtcttatatttctcatgtaccaaccacaatactaaacagaagtctggatacaaatgagacacctagtaaaagtatgttaaagtaagcggaatgtgaatgtttgcttctgggtgtcctgaaaaaaaaatcaactaatcacaacagaaccaataacatatattaaggatctttatcctaaaataatttagagaagttttcaaaatcagcaatacttagtatgtggtacatgttttccaaccttaaaatgttcatagtatggtgttaatcagaaaatctagtgactcataggccaggcgcggtggctcacgcctgtaatcccagcactttgggaggccgaggcgggtggatcacctgaggtcgggagttcgagaccagcctgaccgacatggagaaacaccgtctctactaaaaatacaaaattagccgggcatggtggcacatgcctataatcccagctactagggaggctgaggcaggagaatcacttgaacctgggaggcggaggttgcggtgcgctgagatcgtgccattgcactccagcctgggcaacaagagtgaaactccgtctcaaaaaaaaaaaaaaaaaaaagaaaaaatctagtgactcatatcacagtgccaggtattagggcaaaagattgacacaaacctcactttctttcaaggagcttacctttcatttggggaatcaagaaatacatacttatatatctggcaggcatcagttgggagttaccaatttagttaggagtcatgatgttcattttataggtggagaagcagtggacaacatgttgtttaaagtaaaaaaaaaatctgttgcacggttggactttatcttgactccttaataggggaatggatgtctgttaatcagtgtgctcttgttggacagagcttttactgctttacagatgagctttctactgtagattgaaagaaaaatctttttacatctggtgaacaatgacatctctaagtagctatgtaaactgtaaacctgccattctggaggggcaagaggctacacattgtcatgttgctggccataaaaacatttggsacagttttaacaaattaggagattttatagggccagaatgtaaaagctgccttttgacttctgaatttggccctctccaggttacgtggtgcttctgtaatcattaggtttgtgaccaatacaaccaaagagagcaagcaagacctgttagaaaggttgagaaaattggaatttgatatctctgaagatgaaatattcacatctctgactgcagccagaagtttactagagcrgaaacaagtcagrcccatgctgctagttgatgatcgggcactacctgatttcaaaggtaggggaaatttggaaaatttaaagattggatatttatatgtacttacaaatcatttttaaaactggatgtttagagatgtttattctgatttccccgtttttcttgaaatatttgataatactgatattttgaatctaaattggcatttcccaaacctttttttgactgtaatccacagtaagtgaaacacattacatagtaacctaatacatatctatatgtgtgtctttatgtaagttaagcaatacttactcttgctgtataacatgcattctattttctttttggtttgattgtttgattatgatgctgtttagagccctccaaattagttttacagtctaataatagatcacgacccgtggtttgaaaaaacacagatcataaaaccataaaaaccctagaagaaaacctaggcaataccattcaggacataggcatggtcaaggacttcatgtgtaaaacaccaaaagcaatggcagcaaaagccaaaattgacaaatgggatctcattaaactaaagagcttctgcacagcaaaagaaactaccatcagagtgaacaggcaacctacagaatgggagaaaatttttgcaatctgctcatctgacaaaaggctaatatccagaatctacaaagaactcaaacaaatttacaagaaaaaaacaaccccatcaaaaagtgggcggaggatatgaacagacacttctcaaaaggagacatttatgcagtcaaaagacacatgaaaaaatgctcatcatcactggccatcagagaaatgcaaatcaaaaccacaatgagatatcatctcacaccagttagaatggcgatcattaaaaagacaggaaacaacagatgctggagagaatgtggagaaatagaaacacttttacactgttgttgggactgtaaactagttcaccattgtggaagacagtgtggcgattcctcaaggatctagaactagaaataccatttgacccagccatcccattaaaggactataaatcatgctgctataaagacacatgcacacatatgtttactgtggcactattcacaatagcaaagacttggaaccaacccaaatgtccatcaatgatagactggattaagaaaatgtggcacatatacagcatggaatactatgcatccataaaaaaggatgagttcatgtcctttgtagggacatggatgaagctggaaaccaccattctcagcaaactattgcaaggacagaaaaccaaacactgcatgttctcactcataggtgggaattgaacaatgagaacacatggacacaggaaggggaacatcacacactggggcctgttgtggggtggggggagtggggagggatagcgttaggagatatacctaatgtaaatgacgagttaatgggtgcagcacaccaacatggcacatgtatacatatgtaacaaacctgcatgttgagcacatgtaccctagaacttaaagtataataatggaaataaaaaaacgaacacaggtcaaaattactttgagtattataagctaatcctcaatgcaggcaccactaaattaacttgattaaatgagatacaccaggacctctttgtttaaagtagatgttattctggatagtgtgaagtttttacattgaacatgaaatatttttcaatcaagaaaaaagtgtttctctttggaaaagtcaacygattctgaaagaatatgatagttttatgaagctttgccacattgcttcttttcagagaggatacttagagtgcaatggcacaatatagaaaatggagtttataagttcagcatggctatagagttgggcagacctcaaaactagtactaataggaaatatgccaatgtatcaatcagaattattatttgcaagaaacagaaaccaactttgctgaattaaacagaaaataaatttactaaaagcatctgagtgctgacaggaatataaaatgacacaaagcctatggagaggaatttggcagtagctagcaaaattacatatgaagcagcacttgtaggaatctatctctaaaatatagatacaaaaatacacaatgacatgaacaaggttattcattactaccttatttgtaataacgaaagattggaaacaacccaaatattcatcagaaggaactgattgaataaactgtgatatattcacaaaatggaatgctttgtagctgaaaattaaataatgatgaaaagttctatctcttgataaagagtgctctgcataggatatattaaatgaaaaaagtaagatgtagaaatctttacacattttctgtataggaaaatgagaagaaaatggatatacatatgtatttgtcttatatttgtaaaaagaagccaaagaaggataaatgaaaaactaataaaaatggttacctaaaggggaagcaagggaagaggggatggatcaagataggaggcttttaaaaaagtccccattacataattttgactttggaaccatgtgaatattgtatacaatgaaaagacgattaagtgaaaaaccagcctccaaatagaaatgaacttaggtctgtatgaggttggtggcataaccactcagagaaaagaattacttcaaatgactttaaagtacagtattttgacctgttcattcatagtgggataaattctaaggacaaaagaactacaaagagatcttaaactgcgttcaggagtcttatyttattagtaatactggtattttttttaattaaaggtatatataggaaaaagcaaagtagtaactattagattttagtgtcagtgaaaagagatgcaataataaaaatcaagtaagttaaatacaagctgtgtatgactacttttgaataggaaatacagttacgaactccttttttcttttaaataatacatattatgtaatcttccactggaaaagcctaaagtaatgacaacccagtgctcagactgtggtatctactgtcaattcccactgtagttctttggagaaattactgatttcagatctggacaggcatggtatgagtctggaatagcttattgtgttagcaaagaaactactggagaatactcatggctactggtaaggaggaagttggaaagcctggatatctgcagccaataagagaggcaaataggaattggcatatggataatccatggaacctttaatcagacctttaataatggtatggagaggctgggtgtggtggctcacatctgtaatcctagcactttgggaggctgaggcgggtggatcacctgaggtcaggaattcgagaccagcctgaccaacatggagaaaccccgtctctaccaaaaatacaaaattagccgggtgtggttggcacatgcctggaatcccagctattctggaggctgaggcaggagaattgcttgaacctgggaggcggaggttgtggtgagctgagatcgcaccattacactccagcctgggcaacaagagcaaaactccgtctcaaaaataaataaataaataaataaagttgtaatggagaatgtactcgtttgattgtcatgtctgaagttctgttataagatgccaaggccttaaaacatactttaattttaaaataatatttctgaaactaaaagtagataaggcattatgcagaaaactgtagactctgcagtgcatttcatattaatcatgaatgtgttaacctcagttgtgtcaattagaaagtctaatttcccttgcctcttagattctcagtccctcatcagttgctatcgatctgatagttcatagggaactcatggcagttattgttgattgtaatcagtaaagcattttgaagttagaaattgtcatttgtttgaggacatcaggttacaattttcaattcagatcttctggttacttagtacccttaagactgtgcacaaggaatatggaaaaatattagattttctctctttttccctcccaacccccatctccctctccctctccttctgtgtactctcttatacttccaaagtacactgggcaggataatctattaaattttaaattatggatacagcaaaagtttgcacttgattgactaagactacttttttaaaatgtgacattgcttttaattgcatttgcaacaatcattttttttttccgttcccaggaatacaaacaagtgatcctaatgctgtggtcatgggattggcaccagaacattttcattatcaaattctgaatcaagcattccggtaaacctagctatttatttttcatctgatcataatagttcccttcttcctttccttttgtcattgtcatgaatgggtttatgtgttttactttctggccacctaaattgtacattaggatagacatcttcaagatcagyatcaaataatatgtattactatcttgacttttttgtgtgagtagtatgttttttgtttttattttgtttttgagatggcatctcactctgtcgcccaggctggagtgcagtgacatcatcatggctcaccacagcctcgatctccccaggctcagacttaggtgctcctcctatctcagtttttgtatttttagtagagacggggtttcgccacgttactcagggaggtctccaactcttgggctcaagcaatctgcccacctcagcctctcaaaagtgctggaattacaggcgtgtgccagcacgcccgagcagcagttttatcttttattattactcctatgattctctactgwctatgctaatctccaaaggaaaacagtatccaggctgatccaccaaaaacaataaatgcgattctacctccagtgagaatccaggttatggaaaagagttgacacatttgaccacactttaaaataaattatttgatgagtggtaatgatacggtgaactggaatagtggcagtggagatgaagaaaaacagattcagagaccatcagcatgtcttacttttgagtttagtcagtgaagtagaagagtgagtcaaggatacattgagatttctaatctgagcaagtaagagagaacccttggtttgggatttaagaggtgatgagtttaggtttggtctatgggatattcaagcagagagacatcagtggctgtgggtagaagtagaactagtatataagatattataaatcttcagttaatgtgtgcatttcacttaaatgaactattttgctgctacttctaaaaggaaggctgcatacttgttcttgtacttcccaagataaattggatcagaatttacctgcagatctgccgtagaatgagattgtgacttttctttggattttgtaatttttcatgtcttgccttttatttcttgtcaaaccattaaacagtataatttacctttggatgtatgtcaagtatatagttcaaaatattgcatattggactagcttagaaaatttttctttaatagcctggtaaagtttttgtatttaactgcaagaatgctataaaaaaaaaacaaacmagaattttcttaccagtgcaaggatctgtaagaaccattctaacttatacattatgtagaattcatttcttcatgtatatactacagaaatagaatgtttataggaaactaaaactcactacccaggttcacacatttgggcacattgtttgctgttcatcttgaaaatgactgccctcatgtaaaatctatgtggccagaaatagcagtttgagaacagccaccgtttaccgtgtgtgcacattaattttagattcttggttaatggaaaccacaactacttaatgcacttttatttgtgactctagtcactgtgatagtcaagctcttgtttaaaaggagcaaactcactttttatagttgcccagtatctatttactgtaattatttcctggacatccactgttaacgtcagatcacttggagatgtacttcagtgtatatggtgttaaaattacttttgcttcccctgccttttcaattatcctactttggcctttggttgaggagggagagactatgccatctgctccttaagtaagttctacaactataccaatatcagttttcatttgaaacggaatctgctattattttttctgaatttacttctactacttttcactcatttatttaaccacagaattcaaggagaagatattgattaattttagctggcaatttgggaaggacatatttaataggaaattgggaggtctctgtcttaatgaatactagactcagggaaataaaaatgtatgttgacataatactgactttgtaattgctcggatgctgtctaattagtacactttcctaaccatattgattttttataaacttaaaacattacagtgcacttataggtcaactctaatttcacaaatgcacttaacagctggatggagagttaacagaaggattttaggtcttccctttttgcatattgatgtttccacagggactgccttccaaccaatgactgcagctgtatggattgtatgtggcaaatacagacatcttaaatgaaccaccgattagttaaattactgtttaggctgataatgacaataaacattggattttaaagcccattgcatgctggcttcagaggcatgttacatcaaggcagatacatcaaacttcacattatgctgcatcttatttactgtgtttttagtggatagcaccccacaaaaacgcatagtacagcctttctacaaatatcttttaaatgcctgaacggaattgagaattgtggttggtttttttttttttttttttgagaccaagtctygctctgtcatccaggctggagtgcagtggtgtgatctcggctcatctcgaaaaacaaaaaaacccaaagtttgagcatttaagtaatggaccaattataattgaactcaatgattactattaggaggaagacaaacaagtcacttataatccaacctgaacttagtattaacaagactaaaaatatctaatcacaaaattaatatatcctcatcgtggaaaagtttaaatgctcaagaaagaataaactaaaaattacctgtaacgctgccacctaaagagaacgacagttaacattttagcacatagccagtttctttgtttctatacacatacatgtttacacaaaatttataatgtgtatatactatatagtaacatgctttttaaaaacctaatgtattgtgcatgctttgtcatgttcctaaatattattctaaaacctatttaattcctacaatatactctattttaagaagcacaatgaattgctttgccacaagttcctattgctgttggtattgcaggttttttttttgagacggagtcttgctctgtcacccaggttggagtgcagtggtgcgatcttggctcactgcaagctccgccttccgggttcatgccattctcctgcctcagcctcccrggtagctgggactacaggtgcccaccaccacgcccagctaattttttgtatttttagtagagacggggtttcaccatgttagtcaggatggtctcgatctgacgtcgtgatccacccgcctcagcctcccaaagtgctgggattacaggcgtgagccactgctcctggctggtattccaggtttttgaaattcattttaaaaaactcctgagaacatgtttgttgagcagtatttatgctttctttatgattttttttttcagaagtatagttgccaggcaaaggaattttggggaaaaaaactacatggaattacttagcctaggaaacgtttgaggccttttttccctatattaagaaactgctctccatctcctagagtagcttattaaaatrtcgttatacctgaagagaaatggcatcacaactttcatgtttaaatttatagatgaagcctttttaagaataatgtatttgaagttttgttaataacattcttcccataattgctgtagagtttgagagtcctccaaaagtcttagagatgtgcagaatttttttttttaatttttcaggatgagcttcttaccactataagaagtctttgttgactgttggattgcttgctttcccccatctccttcttaaggaaaaattacaagtttaattactctggtatattaaatccttagtaaagggaagaaaagaaagaaagaacaagacaaacagacagtaatggcctcagtactgcatttgtacgctaactcctgaatatttcctaagtacttagagccctgagcatgaggaatcccagaacagtgtagcagcagggctcaaattagaaatatatctatgggcttttcccatttttgaaagggttgactgctatgcagtgttcttaattaaagtccagactctaaaatactactttggaggtgagaaattgtttaagacttcagaacttgagatgtttaaagcatttcattagtgtatgtaggagaagtttatatgcagatctgaaaatcataggatacagaattgagtatcagaatcactgctcttattttgtagtttgaggatatatttagcaggcagctcctgctactctaaatatgatttgtttacgtgaacaaaccataaaaatatattctgttactgatttttctaaactgaggtaaacatgcactgtaagttatacagattttaagtatacaactcaatacaattttacacatagatatacctatgtaacccccatttggtgatcaagatatagaacattttcagcatcctyggtggctccctttcccagtcactaccactccttccccaggataaccactgctctgacttctataattattgccatttcttaatcttcatatgaatgaaatcatagaattatagcattttttggtctgcttttgagatttatccaagtttttgcgtgtaccagtactttggtttttattttgcttctttgtttttgttgttgttttgtatagtagtagtgtattatatgaatattccacaatttatttattcattctgctgttaatggacatgggttgcttccagtttgggctgttatgaataaaactgctgtgaacattcttgtatatgtcttttgggggacatgtgcattcagttctcttgggtacatatctagaagtgaaattgctagatagtacgataggtaattgtttagttttagtaaatatcgccaaacagttttccaaagtgattgtaccaagacatacattcttgctagctacaaatgagagttccaatgctctatattctctatttaatagtagctattctgtttggtgtatatagtggtatctttactgagttcctatttggtttttttttgttgttatttttttcaaagacagggtcttgctctgtcacccaggctagagtgcagtggcactatcatagctcactgtagcctcaaactcctggactcaagaggtcctcctgccttagcctcccaagtagctaggactacagatgtgtgccactacacctggctaatttttaattcgtttttgtagtggggttttgctgtgttgctggctgttctcaaactcctgatgtcaagtgatcattgtgccctagtctctcaaagtgctgggattacaggtgtgagccattgcatccagcctcagtttcaatttgtatttctctgatgagtaatgctgttgaaactttttcatatacttattagccatttggatatcttttgttgtgatgcacccattcaaatcttttacgttttctgattgggatgtctttttcttactgatttgtcaaagttgtttttttttttttttttttttttgagtcagagtttcactcttgttgcccaggttggagtgcaatggtgtaatctcggctcactgcaacctctgcctcccgggttcaagcaattctcctgtctcagcctcccgagtagctgggattacagccatgcaccaccacgcctggctaattttgtatttttagtagaaacagggtttctccgtgttggtcaggctggtctcgaactcccgacctcaggtgagccacccgcctcggcctcccaaagtgctgggattacaggcgtgagccactgcgcccggccttagagttcttaatgtgttatgtcttacaagactttggttgaatatatgtaccacagatatccctatctttgatttgccttttcactctcttaatagtatgagaagatcaggttcttaattttgatgtagttcaatttgtcagtattttcttctgttttgtttaagaaatctttgcttaccccaaggtsatgaagatattttcctgtgttttcttctgtaagctttattgttttacttttagcaattaggtgtagaatctattttgaattaatttttgtgaattgtgtgaaatagaagttcatttttatctgtgtatactcagttgttccagcaacacgtattgcaaagacccattcttcccccattgatttgcaattgtgcttttgacgtaaatcaagtgactagattctttatctatacttttgccattcatactgtcttgattattgtagcttcataataagcctaaatatctggtagtgtacatcctccaactttattatttaagattgtctyggctattctacctcctttggatttccacacagattttgaaatcaactttgaagtcacaaacaaagcctgctgggagtttgatccttccttaaatctatggatttggacagtatgtacatctgtacaataatatatcttccagtctatgaaaataaaatgtatctctatttagtttttttttgtttcgtttttgtttttttacatttgctgtcatcagtgttttatagtttttagaatgtgggtcttagacattttgttaaattcttgtctttcatgttgtttgatggtattgtaaattgtatttttgtttttgtttttctgagacagartttcacccttgttgcccaggctggagtgcaatggcatgctctcagctcactgtaacctctgcctcccaggttcaagcgattcttctgcctcagcctcccagtagctgggagtacaagcatgcgccaccatgcctggctaattcttgtatttttagtagagatggggttttgccatgttggtcaggctggtctcaaactcttgacctcaggtaatccacccacctyggcctcccaaagtgctgggattacaggtgtgagccactgtgcccggccttgtattttgctaaatttcatatttatttgcttattgctaatacatagaaagctaattgggtttttgtatgttaatcttctgtccagcagtcttcttccatttacttgctaattctaataaatttttgtattaatagaatcttttggattgcattttctatatagacaattgtagacaataatgacaattttaattgtctccttctagagttaaatttctttttatttttcttgctatgttacactgtctgggactcctagtgcactcctaataaacatggtgatagtagatagccttatcttacttctaaattcaggggtagaactttcagtattttaccactttgagtatttcttactaggtcagtaagctatgtttgtttttaatcccaaagacttcaaaactttttttttttaaattctgattataactagaaatagcagtgttgaagttgtcttagatcttctattttaatttttcatttcatctttcactttggatgtgtagtattcgtagatttttattttatgtggaacattgagtctttacaaactcactacatttttttcagtaattaataagagaattactgtgccagtgtgacattggaggtattttggggtttcaattaattaaatgttagtgggattttcytttcgtgtttttcatgattcactagttttagtttgaacttttgatagtttatgtctgttgagttgattggtattacttttaagtgtgttgaatgttaacactttggcattactttagtttagcggttctcaatcagggacagttttgccccctaaggaatattttggtaaggtttggagacatttttggttgtcataactgagggagaggggtggtggtactggcacatgatgggtagaggccagggatgctgttaaacatcctatatacataggtcagcccccacagcaggcattttctggcctaaaatagtgctgaaaagccctgaactagtttactgcttcatttgaaactgaagctcacaaatgtgaagtgactcgccattatttatttttagtatagttactatacttcctacatttatgaataaaaatagttgtcataggtcaggacactgaggcatgcagaggttcatccatgatttaatttattgaataaacatttagcaaaaggtaccaggccttattttttttaagtagggaattcagtgatgagtacaactgatgggcattatggagactgttctagtgaggaagacagaccaaacacaataggataaggattaccaatcatgccaagtgatatgaaggaaaaaaggggttgaaatagttaccaaatgtgaggaggaagtccactttatttaaagagagattaaaaatgacttctttgatttgctgacatttaagctgaaacctgacaaatgagtggaagaaatctatgtgaaaagtatggggaaccatttcaggaggagggggcaccatatgggggctgaagcaggaaagagcttgacattttttgaggaaatgagaacaaagtattgtggcaggagctcagtcaataatgggaaaggtaacttgagagtggagatgcggggttggggatagatagggcaaggctttcgagactgtgctaaggactttggattttatgctggttgccatgagaagctattaaagaattttgagcaggggagggacatgatcacatctatttgcacttttcaaaactcctgctattgcttatacaatggattggagtaataggtcaagagaaaaatgcaggaagaccagttgtaaggctgttacagttcaggtgaaagagtaagacaattttgagatattttaatttttgttcaaaattggaaattactggatttcctagtgaatagggatgtggaggtggtgggagaaattgagaaatcaagtatgactgatagggttctggcttgagtaactggagaaattacagagatgggaaagattgggaaagaaacacttttggggagtggggtgagagggacttaccagtttgacgttggacatatggtaggtgtttgaccagtacttaatctgcagtataatttcatttccacatgcttcatcttcaggggaaatggttatttagaaagacagcgtcgtgttcaggcatacctctttttattgcactttgcattatcgcgcttcacttgcattttttttttttttaacaaactgattttgtggtaaccctacattgagcaagtcatcggcaccatatttccaacagtatgtgctcactttgtgtctctgtgtcacattttggtaattcttggcaatatttcaaacttttcattattattatgtgttgtggtgatcagtgatctttggtgttactgttgtaattgttttgggcagccacaaaccatgcccatgttaagatggcaaatttaatgttgtgtgtgttctgaccgcttcaccagccagctgttctaactctctcctctcctctggcctccctattccctgagacacaatgatgctcagattaggccaattgataaccctacagtggcccctgagtgtttaagtgaaaggaagaatcatacatctcttacttaaaatcaaaagctagaaatgagtaaggcaagtaaggcatgtcgaaagccgagataggctgaaagctaggtctctcgtgccaaatagccaagttttgaatgcaaaggaaagttcttgaaggaaattaaaagtgctactccagtgagcacacaaatgataagaaagcaaaacagccttatcactaatacggagaaacttttgtggtctggatagaagctcaaaccagccacaaaattcccttaagacaaagccctaactcttcagttctttgaagactaagagagatgaggaagctacagaagaaaagtttgaagctagcagaggatggttcatgaagtttaaggaaagaagctgtctccataaacttgcattaaagtgcaagatgaagcagcaagtgctgatgtagaagctacagcatgttatccagagatctagctaagatcattgatgaaggcgtctacactaaacaacagattttcagtgtagatgaaacagtcttacattggaaaaagatgccacctaggactttcattgctagagaggaaaagtcagtgcctggcttcaaagcttcaaaggacgggcagtctatcttgttaggggctaatgcagctggtgactttaagttcaaacctgtgctctataaatggaataacaaagcctgaatggcagcacatctgtttacagcatggtttattgaatgttccaagacactattgagacttacaggtcagaaaaatagattcccatcagaatattactgctcatggacaaagcaactggtcacccaagagctccgctggagatgtaccaggagatcaatgttgttctcatgcctgttaacacaacacccattctgccacccatggatcagggagtcgttttgactttcaagtcttactrtttaaaaaatatattttgtaaggccatagctgccatagacaatgatttccyctggtggatctaggcaaagaaaattgaaaaccttctggaaaggattcaacattctagatgccattaagaacatttgtggttcatgaaaggtcaaaatgtcaacatcaacaggagtttggaagaagttgattttaaccctcatggatgactttgaggggttcaagacttcagtgaaggaagtaactgcagatgtggtggaaatagcaaaacaactagaattagaagtagtgcctgaagatgttactgaatcgctgcgatctcatgataaaacttgaatggatgagaagttgcttcttttggatgaacaaagaaagtggtttcttgagatggaatctactcctggtgaagatgcttcgaacgttgttgaaataacaacagaagatttataatattacataaacttaactgataaagcagcagaagggcttgagaggattgattcacaattttgaaagagtttctgttgtgaatactgtgaaacaacatcacatactacagagaattctttcatgaaaggaagattaaaytgatgcagcaagcttcattgttgtcttattttgaggcattgccacagtgactcaaccttcagtgactaccaccctgatccgtcagcagccatcaacatcgaggcaaggccttctgcccrcaaaaagattatgactccctgaaggctcagatgattgttagcatttttcagcaataaagtatttttaaattaacacacatacttttttttagacacaatgctgttgcacacttaatagactatggaaaaccaaaatttatgtgactcgctttattgcgatacttgctgtattgcaatggtctgcagctgaatccaaaatatctcatagatatccctgtatttggaagaatcccagattggttttcaggttccagcttccagcactggttctagctctccttgattggtgccagcatctcagatgatctcatctgtaaaatggggcatgttggacttgatgttcctttgggtctctttcagtaatattctgtggctctaaatttattttaaattccggggtacaagtacaggatgtgcagagttgttacataggtaaacgtgtgccatgaagatttgctgcayctatcaacccatcacctaggtattaagcccggtaggcattagctatttttcctgatggtctccctcccctgcagtcccaacaggccggagtctgtgttgttctcctccctgtgtccatgtcttctcattgctcggctcccacttataagtgagaacatgtagtgtttggtttgctgagggtaatggcttctagctccatccgtgtccctgcaaagggcatgacctaattcctttttattgccgcatagtattccatggtgtatgtgtaccacattttctttctccagtctatcactgacgggcatttgggttgatttcatgtcttttcttttgtgactaatgctgcagtgaacatatgcatgcatgtatctttataatagaatgatctatattcctttgggtaatctaatgggattactgggtcagatggtatttctggttctagggctttgaggaattgtgtggctctaaatttaaatcactccttcagctttctctygctgctctgcctgagatttttatatggtagccctgctccctgggctaggattttttacactttgtttattcacctacatggaatttatagccagaaatttttgaattaggccttctttgtgcctttaaaatataattatatatatgtaattattataattgtaagaaataattatgtgacttgctttattgcagaagcaaaaacccagaacccaaaaaccaatctagtattcttccaaatacaggcatgtctatgagatattttggagttggttgcagaccactgcaataaaataagtatcacaataaagcaagttgcataattatttcttataataattacatatatattatttttagagatggagtctctctggctggtctggaatcctggcctcaagtgrgcctcccatcttggtctcccaaagtgctgggattacaggcatgagccactgtgcctggcctccaataggcttatagttagacaaaattttcagattttctgctgacatattatctctgtattaaaaacaactatctttttacattttgtgctgctataacaatacctgagactaggtaatttataaagaacagagttatttcttatagttgtggaggctaggaagttcaaggttgaagggcctgcactgggtgaaggccttttgctgcatcatcctgtggtagaaggcagaaggtcaagagagcacgcacacaagagagggaagggggccaaactcatccttttgatcaggaacccacttctgcaataactaacctatttcttcattaacggtggagctctcatgacctagtcaccgcttaaaggcccccgtctcaacactgttgcattgggaattaatttcccaacagataaattttggggggacaagccatagtcacagccaaccttttgttgccctgtctagtaagtataaaaatactccaagtattggggtggctctgatatttttaaaaatgtttaactataaaagatcttttaatctgtgtcctagaaaacagttacttttcagtccatcctcaatatgccttggctcttcaaagattcagtaaagcttatgctatgcagagaagaacagtagaaggaagaactgcttccctgagagatgtataacacttctccagcctagtgtagaaccagttcccatttagagaagtgtagaggaacccacagtttcacctcttccagggaaggcactaaagtactgcctgggaattaagtacacacatcaatcaagctgataagtcttatccccagttaatatatgataaaatattaacaaagctaaatcaaatgagttttcagtttaggctatataagtggaaagcaattttgaggtctgttgcataaagaattctagttccgtggtagagtagcaaataagtgggcttgggggtggggtgacaggagaagagatagataagtcacccgttagtaactcattgctgtcagctctaggtctttaaagccaacagaatggctttgccaggtttcctaatagttgtatttcaagagcagctttaagaaataaatttgtattaatattagtgaataaatttgaaggatctgtccaatgctgtgagcaatttgtagtaactaacagtaaggccctgtaatagtattggtttttacttaataaaatatttaatcataaatgtctgaattctgcatctcccacaggaaggcatttccatgcccactgacaaaaataatttagcagtttcatagttgagcgcttaattactcataattgtgaagggtaagatatgatgaattcttccttgatggacatactaaatattttaacgaagtagatgacttaaagtaaattaagctagtgagatcatttattacattggttaaaagcagtttaagaaatatatcatgtcccgcatgctattagatgataatatgtgcgtgagtacttctgccatgtgactaaaggctgtattattgtgatggatggcagttgttttaggttgggtgttggaaaatgagtattaaatttctggggactttttgacttgttgttttgcctgagttactaatgaggattcttagctataggtagaatttgcttgtcaaaataatgggaaaactctttatgtccttttgtctgatgtgagagtattcttcgtcctgtatcaggacaaaggaagggacctgatggggaagggtctcctgtaaatctttttcttcaggaaagatggcctgatttgcaaaataatgttgaaagcagtcaaaaggtaaaagaagtaaaagtgcaagcagaaactctttgtaaaacactttattaaaaatttctgaattaaaaagaaacttacattttggagtagaggaaacaggagttcagatattttaggagttaatatcactgcagcaacaattgtgtagtattgtaaaaggctcaggagcctcctgcttaccattggggaaggttgaaacaacttgtctcattaagttaagcttcttccctggagtgtcttatttagctttagttctcttaattctctttccctggtgatttgggtagtgtctgaaaccactaaaggtaaaaggttgaagcaatcccaaatttaataatctatcacctttctttagtgtatctgagtgtaattcccagcagttctttgtgaattcattagaagacagcaagtcattaaaagttaataagaaactatttgtttctgtgggtgtgaatacagccactttgtaagtctgacattcgttcccagtcataaaagccttgcttttagccaatttgttttttttgttgttgttctctctaggttactcctggatggagcacctctgatagcaatccacaaagccaggtattacaagaggaaagatggcttagccctggggcctggaccatttgtgactgctttagagtatgccacagataccaaagccacagtcgtggggaaaccagagaagacgttctttttggaagcattgcrgggcactggctgtgaacctgaggaggctgtcatgataggagatgtaagtagaagaacccaggaggtgctcccagctcacstgttgtgctgggaaagccagcttagaaacactgctttaggaaaggggacattctgttactgacaatgtrgacagtatatatataaatggctacctataaaatgaggtttcctgtcgatgtttagtggtattcttctaaagaactgaaatttttattatttctgacatttctccatagcgtaataggagatttgtgtgttatgatacatatatatatgtagttaactcctataatatatatatatttgtatattatatatatagttcaaaagccatttatattgcaagtcaattgaatgctttaaatgtctttttgagaaacaatgctgcacaaatgagaacctacaccaaagaattctaccactattgtttttttccttagcatatgctgtatggaagaacttctctatctgtgtgccacaaatagctaaagctattgatcaccttagccctttgagtggcagggctgagcctgggatgattggaggccctggmtggtcacctgtggccgtgagcaccttgtcagtttaccccagtgtactaggcaaatgttatttcccatgtgtgtcttgatgggaaaacagctggaaagcacactgccacatggtaaattggtggccaggattatatttcaatttttaaataataacatgtcaagctgggagggatcgtcacaaatgtctggtccaaaactcctcattttatagactgggaaactgaagcccaaagaggtgaatcaccaagcctgaattcccatagctaattagtagcacagctggaagtagagcttgagctcaggactccctccctagctgttttaacttgtgatggtggaaatgtgtatcacagtcctcctgattttatcttctgtttctataatcattcacctaaaattgaataggataatcactgagctcagtagtattttgagaaaccatcttttgagtcacacctgttcctcttgacaagcctttagctgcctttcctagacaaatatgtctaaaaaagtggttatctgagctggagccttcagaattctttatcccaggagttgctggccctgggacaggatgagaggtgggaagggatgcaacagctgtgctgcatggggggctgttggttacccaggaaagtggyggttccctgccccccaccgtctcattgtccacattctttttcccacctccctatctcctctcccccatctccactcttcaacagggcaagtttagctgtaacagaaatggtttgaagttggaccttgaatcaggattttgacattctgaaactcattttcaagggctgttgttgaacaatattaatggtttttaaggaaaaaaaaaaactttcttcaggcatggtctgaatcaatcctgcttatagacatgaggtggcaagattaatttttttgatttttctttcagtccttggaattttaattaccttgcattcatcatcattgatgatgtatatttatccttatcttgaataataattagaaagaggagcttctttttcaractgatctgttattcccaagtgtgaagtgaacatcagacagtcagagtctgtttaagtatctggatttaacttgattctacctgttaggacaatgggatagaaagtaaggataacatactatgtgggccacagaaaagctatcttctgaatctagctcattccctgtctgcagctgtattatttactgccaaatggatagaatgcatttttccatgatctgtttaatggggagataaatagatgtaggtgtggcaaagcatagagaattgtaattgtaactcagctctctgtgtttggttaccaggattactactctattctataccttccacctctgagatacttccctttcccaatttggaatgcttcctcagagtattacatgtggattcaccttttacatcttctcttttctatttcaataaaaaacatggcattacagttggacaccctagcctaataaatcagttggtaatgtttgttggctagcttactgaagacactggactaaatgctttctttatgcttttctaggattgcagggatgatgttggtggggctcaagatgtcggcatgctgggcatcttagtaaagactggtatgtatcttctgtataaagcattttctaaaacagaatagtagaatacacagtwgcttaaagaacaatctttgcagaaatggcagagccctgggcacttttattctcttcctgccacaaagcaaaaataaaacagcttaggattataggaaacaatygggaagggcccgtgstgtacaaagctaggaagatcagggctcagaggtactttagtactttcccagaggtaaccattcctggttgacagcatttatattatttcctggatgtacagttcaccacagagggatgaagcaaaggaccatggatggtggtgctctgtgaaaataccttttatttttgtgctggctatacctgtgatactgatttctttaggaaactggccagctaagtgatctgattctttgtgttaatgtttgaacttttacaaaaatatttgaaaaactcttttttctctttacttaccgtttgtggtgagcaaaaggttaagaagtatttcctgcacaattaggtttactctatgtggtatctcaaataaatttaggaaaaaggaaagactttagtggggaggattcactaatacagtattatgaccaccgtagactggttaagtgccttgggtcctggtcagctctgcactaactagctgtgtgagactcgggtcaaggctcttccccttttcaggccctgtgagaatgatgggattggactggtcccatctcgccctcatagtttatgatcctgtgtagagtgggactgataaagtcctttcgagataaagaaagaacaggcataagatctgttagtggggctgaatattattgcattgggaacttaatgagctgttaccgttaaaatgaaaagcccttcttcccctgcatgctgcccccaaatggcacctgctgcatttggaattaacagcacatgacagccagaaatcttgtccaagaatcatcaccagactcttataaatcaaatagcagataaatggttccatagatgtctctgtgagctcatttgcctggtttcatatcatagtagtaaaactatttaattggctgtttacagaagggaatatttaaacataaagtcaaagaagagttacaactggggaattttttagaaaaagtgactatgatgtttgttcaagaaaatgtggttgcttgaaatctgttttgaatttcaaatagaaacaagaaatgtagatggagctacaattgaataagaagtatgtggcaaaggtctgcacaaagagtgaaaacactgtctgcttgctcctggggcctgaagtgaaccattggagccttgcagatagtaacaccagtcactctagaattaacacagtggattttttcgaatgtctcagtcaaaatgatcaccttcccaggaacgtaacagccctgtgatgtaagcagaaaagaggaagaatgaaatgaagtctggaaaagtagccacactcgtcagcctccatgtatctttgttttcagattcctgccttttgctgttttattttctcattattgaagaaatccttagataactatttttgctcttgtgtattattcccatgagtatttctttctttctttctttctttttttttttttttagctcatgtaattaaggatttacactgagcttcaaaatggtacctctgtcagtgtcttgatgggcccagctcccccagctggtctccactggctctgtcgtctattgtgactggcattttattgtgaccagcctttcacaggcatcagtttagtctctgagaagccatcagcgtaacacaatcaagtccaaaatgtgtaattagtaaatcaactaagtacagctcttggaagcaggcatatttgtaccattgatttttggtcagaaaaatcatgaataaccctactgttctaaaaacatgtggaacagccagcttcattggtaaattttaactcagtgcagtggacaagtgctaggcttcccagtgttgaaaataaccgtaaatattttaattcatattcaataataagtgctttctgtggatcatctcgagcaattttgtttctaaaggggtagcacaaggtagatgctcaatataatttgatcaattatttgttaaagatttttgactagtcctaaccagaatttgtttagcatgtgaaacagtcatctagaaaaaaaataggatctttctttgccttcatatatcatcaacatagcatcctgttttctccctccattcatcatttatccrtccatgaaagcacaggctgctgcagtgagtgaatcagccatgagcaatgcaggcagctccattcactcaaygaacgttattgagcccctgctgtgtgctaggtgctagaactaaaacatatacctaagccacttttgtcaatttctattttgtagaaaccccacttgcagagccagactaagcaaaagcctttaactccatggctaggaagcttatttatttgtctcttagaccactggatccagaaagtaggtcatatagtaatatttagtcattaacttacctgtaagatcaaatagaaaccttgtgaaggagtttatactaacgatatttaagcttgggaagaaaactggcagtagagcttgctgcggggaccatgctatggacaggtgccttcagggtgctaacgagagtgaggtatatattaattacctttgtacatttgatgctggctcccttcctgtaagaagttataatcagtaagataagacaggaagcgtcttctccaccatgatgcaaagatgtggaaaagagggtttttcaggctttgtgtttgtctggcaaagcctcttaaagtagttgtagaaaacagtaggtctsttgttgaaagagctgagtttaggcagagaaaactgggaaaagcagaagaatcaacaatagagaccacaaagggatgagagagcaaggagaaaggtgaagggcagaggcagccctggtggctacagggcaggagctgcgttctgcatttcctccctcccctctcttcttccctccattcattctttaaaaagatatttataggatagttactatgtgctagtcactatgttaggtacttggaatacrttgggacatgtaacagatatagcccctgtctcaaataacttagtcttcttaaatgtgagacagatgttaaacaaataaatgcataattacaaattgttgtaaatgttgtggaggcaaagaacaaggtgaataacagggagggggtttaatttggatgggaaggtggggtctgacctgaagcatgaaggaggtagtcaggtgagaataatggaatgacaagggaatggcacgtgtgtaggccctcagaaaagcaggtccagtctgggactgcagcctggtgagccagtagcacatgcttaggtgagagggtcactggggctgcatgacaaagggcttggtaagcagcagtagagattttggattctttctgaagggcactgggacccattaaagggtctttaaatagggactgtgcaccttctgacttgtaaaagctctttgtgaccactgtggaatggttcctctgctgtgttgaggtgttaaattgtgtgccaggtgctagaacagcaggccatcttgaattccacggttgggagagtcaggcagtgagcctgctgcttgatgccaagtggcctgtcctgcctggcccctggcctgcgagcatccatcactcttttcctccccaacccagggcgttctcatctgctgggctcccgggctgcctggatccctgcgtggcagcagcacatcctgttcccagttgcctttgggagcggatgagtcctctgccctctggggtctgggcttccattttaaagcattaatttaatcaccaatctatctttagagctgagggtaggggaaagaaaatgatttcatcagctgtgaacatgtgaagggaatcttagctgtcagacgatccagtacctgtggctgtccattgtgaatgaccagagggcctggggaaaggctgaatgtgacatttctttgaattgcctcatttacatcctgaagcctcaataaaaggtgatttgggagatgtgcagcccctgattctgtcttaactgtaagggtggtgctgtgatgacccaggtgctcatggggtatgattaatttagcattctggtggcagcctgtgtttactggctttactttcatttcagggaaatatcgagcatcagatgaagaaaaaattaatccacctccttacttaacttgtgagagtttccctcatgctgtggaccacattctgcagcacctattgtgaagcartgtgtgcatctgaagcaacttgaaatgcagcttcttattgtctggaatgaatcccttaccaactcagtgccagcatcggtagacaccagtcagtgctgatcgctttttaaccctcttttgttgtgcattaattagaaagaaaggtattgaattgcggctagccagtaagccttgctaatctcttttattttgtaactgaagatgagacccaaagaaagggaaagctgagattttgtgccattccttttaaaatattcatcaggttaggtggggctgtgggggaaaagctacyacagggaagagtgttctctgctgtctcttcactggaaaacagggaggggggatttcagactgtgaagaaagttgaatggtggtttttaaattataaagtaatgtattaaaaggtgcattaggctgtagttctaatattgagttcaactgtgaaatccatcagatgtgccaaatggagaagacagaaagcaacaaagtgaattgttctttagcccaagtggtacagtgaatttgctttaacagatgttgaaaactaaattttctactgtattcccagcacgggtgacttctttttctcttcattagccagagatgactaatttaaatttagaaccagattttaatttaaattaatatttccattaataacctattcattgcagatacctattatactgtgtaacagttgttttggaaattttatgtaaaattaaaactatcagtattttacagatgttttaattaracattgttattaacaggaacagtgcagaaactagaatcaagccttataatatcttatagaccatgcatttttgaagttagtgtccactagggtcctattaactgtacatttgcaagatttcattatttttgcctctgacactatgggaaaaattttttagaagctattgggacagattcaagcttttatgcacttggttactacagctgtaaaatgaaatctcgtcttgtagcatggattattcttctcatgttaaacccmccaaaataaaggggactaaataggtaatgattttcctagtgcatttgcatactgtgataatcctgggccttgcaatagttctacagggctcttgggcattgaattattaggatgtaattgtacatcattgtagtgttcaccttattgaagctcactctgatgttaatgagcttcgggttttgatgcttgtttagagatcagcagtcttggatgggagggaacaaagctaaataaatgttagtttggtgagcactgtgtttttgtttttgcaaatgcctcatcttagtacttctatatcccagagtgcaaaagacagatgtgatatgactaccaccccaaatcagaaggatgagcggagtggctaagagtatactctggatcctggtaacacaaaattagctctctggccttgggcaagtcacctcacctctcatgccttctttccttatctataaaatggggataatgatagtgcccaccacatacggttggtgtgagcattacgtgcatgaactatatattaagtacttagaatatcattgggcaaatgatgagtgctgtgcgtttgtgatgatgatgatgatgaagcaggactctccacatttaacagtctgaaaaaggttggtagaatttatctttacatttatctcagtggagaaagtcttcctaaggattaaaaaaaaggatattctttactacatttagacttcctcagagcaaagctgcacagagagagagctcagcctgtgggtagagagctctgcgtggtgcctggtgggtgggctgccttcaattttgccctgttgcttgggcacctgggtcagtgatgccttggcccaagcattatcaagtgtttgctagttgctgtgcactgagtgccctgattatggtgggaaataagcatattaagaaaaagattttgcctcaaggatccttttcagttgaagagctaaggaaaagaatacacacagaggcgttcctgtcctctgatgtcgtccctgacttcaggatggggcaaggtgtcccctccttcatgtccgtgtggcacttgaagagtgtacttatgtcttcacatgctcttctccccactagacagggctgcatctcatttttttaaattttaattttgctacccagttaaatttgagtttcatcattctttcctatatctgctgcaacacaggtaagcactcaaatggttactgaaccaataaaaactaaatatcttaggaatgtaatgctagaaagcatagctttgagtgggcaggagaaaatgttcattttagacttgttgtcttaaagttgcccataggggaggccccattaaataaacacttggaagtaatggatcagatgctctggagacaggttagagctaaagccaagaagggaacatcattgatgggtcaggaagtgaagagggtaaaagtctcctgagcatgatggactcagccgggagaaatggcttctctccattcttccattccacttaatccctgtgagccctgaaaatcttagtttgagatctttaacaagcattatataggacttgctaactgaccggcccacagtaaggttcatgagaataactaaaaatcttacttataaacattccaatccatgttagtctcagctggttagtctgccttgggcctcatggaggaagtttagtaactgaagtttcttaggcttcattttctggctgtcccatttaaagggctatctggtattaatttcaaggatggtgtttgcatcagttttattataatcctgtcctgggccagaaaagggaccatgtgacaccttgggactggaaaggttattagaaaacatccattgtcgggagttgagtgtcccacatctgctgtgagccaggagtgtggagcagggcagagctccagtccaggggaaacagattcaaccccctccacccacacctccagagtcagccacaggttgcagtagctctgcctcccgtacgttctgcatctgtgagagctaatcgtaatggctaggaaaggaaaaggaggataacctacctcattctaagtgacaattccatcaaactttacctttagccgtgatgtcagaaattcccatggaatgataatatatgtcacttcacacataatcccacattttagaacttacagtagtgtgttggacagagaagttaaaaacacctacactgattgtgttcaattggtttttggatcaatgtgtgttcatgtaggataaaactgaagtccttgggcacctataatagagaatttttttaaatgacactaacctattgcattaaaacactgcctcaagcagtagaatccctttgtgatgttagcagttgtttgcagagggctgtgtttgccttatcatgtttatttgacataagtcacaaaagcttttttcagcctaaatgcacaaggcttttggtgacttccgtattataccagccatcaaggcctcctgtcccaaatcatgttgctatctttaaggagcagtaacgagggtgccaaagtaccagaaatcatttgtttcaaacagtttgaatgttttttccagtgcttttctttatgtcatacacagctcaactcctgtttgtttcactagctgatcttcctgaaaaaatcagatatttaatgttctctgtgagtaaagcataagggagatggagagaatacagctgtggctcctaagatgtgtgtcttttagttgggaaattaacacatataaaaatttataacaataccaaggactctgacatgttcagaatggttgtgtaagtcctctaagatcatgagcagtgagcaaaatgcatgagagtagtagtcacagacagtgctcagatagcctttggcctacgccattttaaataatgtttcattcaatggcagtgaaaaaaagtactccaggcatggagcttacatttggagggagcaaacaaatgatgaaacacgtgcatttatacacagctaccgaatacagtgagagattgatgaatgatgaagaagaaggccaacaggaatgcggttactttaggtaagtatggtctgccaaggaaggcttttaaaggtgagtgggagcaggctgtggaaattctacaggcatatagttaaccttgattgccaacatctgaacaccaggagattctaatgcaaatcaaccactgggttttctaggaagatgggaagaactggcttatgttagatccaaatttccatgtccaattggagcagagtcattactgtgtcagagagtccctggccctctctagctcaccaccgtctccacctctgctttgcctaacatccatcttactcctaatttgccactacattccatgtttctgtaggtctttgggctgtgacctctgctttggaagaaaatacattaaactttcctccaacagctatcaggccaatctcctatgtaaacttagatatatacttctaatctactttaaaaaaataatcatagagactcaacatagtaggttagtcatatgtgttggtctctttttctcaaagccacaccaaaataagagtaaaaggaataaaatgtaaacccacagggtcagcccacaagagaaggtagaggaggcatcagtggatgaaaaggtacaataatctgaaaggtggaaactggttggaatgttgatagccaaaatcagtgcaaagaaaatacagccaaaattcatcctgtagaacaacttcaaagacttaaggcttgcagacagcaggtagggaggaagtgaggtacaagacaggattgaaagtgaggaattggttagaagttggagcctcaggaaacttccccaccctgagcagtcagatgccaacccctagtcaaggcaggagaatggaaattttccattattctctggaaaaatggaaccatggaaattaaggccatggaaacagtgggcatggtggtgggccagggtgagatgcagggctggaaattgattaggtacaaattgcttattctgccatggtcttctgctcccctttcccttagaacaccaggaccagagcgggtgggaagggagtggaaagtttatctggtatgtttggccatttggaaaagaatattgatgggtatctgacaggtccgagaatgtgttaaaaaaaaaaaaagatacttagaaaattaagcaaatagaaaaacaaggcagttgttaattctaggaaagacaaaacaagaaagcaaatgtaattctaattcactagctggctctgcagttaacaatgtacagttctattaaaaatattgattattgagttaacctaaaatcataatagaacttttgggatgatggagacagatacgtatatgtggtaaggaaagggcagagagatgaaagagctacacttcatttcatccaaagtgggaataaatatataaagcatcaagaagaagccaccaaagtaaaggcgtgacagaaaaacatccacatgccgaagtatttgaagacaaattttcttaggaaaaaagaggaggactgagtatgtgattgaatagaggtggaagtgttaaaaacatggactaggcgatatttaaagggaatggaggatgtggagatgcagcaggcacacaggctgcatatggggttttggaagtggaagaaggttaagtgtatttgctgtgagggatggcaggactgcacttattctgaatgaattcaggaacgggcagtaagcagaaaggacctaaatgtattgtcatgaagcctgctatccagaggagcatttcccctgcccctttacccagtcacttttgggtatacatacagcaccaactttcccactgcagcaaattcacaacagcagttgagattttataaaattagaaatgatggtagtggccacaagcaaatggactagcagctacaagaaatgtcagctgatgtcagttctgacaagaagaacccccgccaaaccataaagtagacatcggaacttaggccttacatcagtcttgggccattcaaagtagagtcatctatgtcagtggtccccaggctttttggcaccagggaccggtttcatggaagacagtttttccacggagtgggcctggatagggggcgggggatggatgcttttgggatgaaactgttcatctcagatcatcaggcattacttagattctcataagagcgcataacctagatccctcgcatgcacagttcacaatggagttcacgctcctatgagaatctaatgctttcgctgatctgacaggaggtggagctcaggcagtaatgctcacctgcctcttagctgctgtgcaaaccagttctaacaagccacggacgggtactacgggtccatggcccagggactggggactctctatatcactggtgctgcatggtgtagtgcctgatgcttatgaagaagtttaagcatgtactgagatgaaatcttttttattttcaatttgttaaataaggtatattttcaatttgacattttccatgaaatgatgtttaaagaggcatttgagaataatctcaaaataatcgataccgaaaaaaatgctttggttttgtttaaaagggtaaaatcctttgggatacttagctatccaaagtgtctctttctggaggtttttcctcttgaagagtctgtctgcagggatgatgaagacaaggcaaggaagagaaaagaaggtgatttcccataggtaagttctagtgggggaaaagaagtggcattacttagtagaagccttcaaaatttatcaagggttgaaagtagatgcctcggattgtgggtttctgagagagatgcgtctagttgtttataaccccttaaggagagggggaagagcctaagagcagggaagacttgggatgaatgttctcgaagcttaggtgccccatcctaagctttggatctgatgagaagctgcggcaatggaaagagaagggcagagcacaccggatgtgaggtgtgaagagtgaaaagatgttattgggggccagaacccaaaacaatcagactggcagctgatggtgatggtgtgctagtcaccctggctattagctctagcatcagaatgctcagtgacatttctgagtggggcttagtttgggaggggtttgctgctgacaaagctggatggagtcagaattagggggagctgatgagattcagaatattgtccggaatgagaaacagactgcattgccttccctgcttccgtcctccttcaccctgggactgtcagctgggcagtgcctgtcaag

SEQ ID NO: 93980 - DNA, 13038 bp, Homo sapiens
cttgagcctcccctgttgaggacatcagcaagaatcctggtcttcagccatgacctctgcgaaattcaaggcagatgtgaatggccacatgcagcaggtcaaggggtcatgtggctggcccaaggacacagggaatcaggtgctcaatgggatccctggagacacagagggcaggaacctgtgctcagcaggtgagtggcttagattcaacctggctctgtcactccttggctatatggccttgggcaagtgatagaatggatcgggtccacagtatccttgcctgtaaagtggggacaatagtaattgtacatactaagtctccaattgactttaactgtaatcatagagtctctggtctgtggctgtttgtggcgacttagctgcagggtggggaactaggtggccccaacagccagtactaaaaagagatctgaagttggtatgcattctaccccgtcttagttttggtgccccccaaagcacagcctgagacagagcttgggtgtgggtagtttgtttgggaggtgaccccaggaagcaggaggaagtgggggagggtgtgctttcaggcctcagagaaccttctgaaatgtgtatagaaggtctctatactgtattgaataatgttcccccaaaatttgtgtccacctggagcctcagaatatgaccgtatttggaaatagagtctttgtagatgtaattacttaaattaacgtgaagacacactggattcaggtgggccctgaatccaatggctgatgttgttattggcaggccatgtgaaagcacagagagaaggccatgtgaggatggagtggagactggagaggtttgtctatgagccagaaagtaccaaggatcactgatgaccactggaagccaggagagaggcatgggatgatttatccctcagatcctccaggagggaactaatcccgaaggcactttgatttcagacctctggcttccagaactgtgagcaaataaattgctattgtcggaagccaccagtttttgctcatttgttacagcagccacaggaaactaatacagcctcccagaactgcccaccacacctccagccatgactcgtctcccagctttcccaagatttccttcactcatgcctccattcattcagtgcacattccctaagctcctgctcgctaggatgttgcgacctggtgcctggtcacggtgagctcaggtgcagtgagggagacactaaatcattgggacacacgtgttaagcttggtgattgctggaaacaaagcaggtcaagggagcactgaggagagtcccagcttagccagggctgggggctgcgggcaggggcagggtagtaagacttccccaggaagactgctcacacagagaaaacagtatgtgccaggaacagtggggagacagcgtggaggatttgggaagaacactgttaggtgcagtgggagagtcaggagataaacactgggcatctagagcactaagttgataggttgtgggcacctgctgcccgcagcatccttgcatgcctctcctttcaggagtgtgacccaagctgggccaagagaatccttgtctgggacttcattatagtcaccatgaaaggaagtctctcctgtctggcttggctggagctgggagtggcctgcgactctgcttctcctcctgcttggacaaggctcactgtcagagggagaagacagggccaaggcacagaggaaggaaatggagagaaacagagaaaaaaaggttgcctgatcatgtctgaggtcaggtccactcccatccttcccagtctcatgtcagcccttgtcttatgtaaattagttgggtttcagacccttaaaacagaaagcggaaaaccttcagatggtttttaaatgtgtatatcatgggttgaatggggtggcctccaaaggaaatttccacccagaacctcagaatgtgaacttatttggaatcagcatatttgcagatgtaattatggtaagaatctcaaagtgagttcatgctggattagggtaggtcataagtccaatgacaagtcctcataagacagtgaaaaggagaagccacattgagagagatacagacagcggaggccatataagtatggaggcagagattggaatgctgcagcctcaggccatggaacacctagagccaccaaaagctagaagaagcagtaaggatcctcccctagagcctttgggagtgggggaacacagccctgctgacaccttgagttcgggggaagtgagcatggcttttggctcattgacccaccacctctgatgactcccagggccctctcctgtgccccactttagctcctcttggcctcatctatctatgatcatagccccagctgtggcagccaggtctgcacaggctcttcccagcttcctgcaacagtgacctgacagcatctcacccagcgtttattaatactgggctcaggatacagcaggaagcctccttggccgggcacatgcactatttagaacagtgaggaataaacatcaaataggctaacctttaaccaacaggagtttcaagtcattggaaaatttctgcactctctctaccttgaatgattgctctgagactattctcgtggaatcattggaggagatcaggaagtcacagaaggtggagccaaggcactcctccacccagcctcacgtgctgtcccatacctgatcctgggaccacactgcctaacagtcctcgaacaaaagcttctgtctccagctctgcttttggagaatccaggctcaggcaggattcacacataattctaaagcaggggctataccatctggctgcatgtgattgttcttcacagctaaagccagtgaacaactatgtactaaataagatccagatgaggctgttttaacaagcaaccttgagtacagtgacttcaaaaggaaagagtttatttttcacttgtgtagagtctgagtagatggcccagggctggtgaggagctgggaagcagggcactctagctcattctcagctgtcaccatgactggtgtcaaagcgtgctcttgtcacattcctacctgcaggaagagaggagaggaagagtgctccttttatgggctctgctcacacccctttgactgaaatttgtacacaaaattttgttatcaaaatttggtcataccccttgctgcaaggggtgttaagaaaagtggtttcagctatatggccacgtacccaacccaaactggtggatcccatgatcaaagggaaactggattgatggatactgggagaaaagagcatcctctgctgccaatcaaactgctttcaggaatctacaactacagacaccctaccatgcaaaacaaaccaatttggaggaaatatagtgaacatgagtggcattgattcagggcctccaaggagcagagtcctttacattcagatcaactagtaacctcagagctgtcctacgaggcctgtgctctatcattcccattttacggatgaggaaactgaggctcagaataagtaatgttctcaaggtcaagaagtgccatagttggaatttgatataacacagtctccttgggcaaatattcttgactcccttatcacactgcctccctttgagagccactaacttcctgcttccaactcttccaactcataatgaccctctctgggtcattatggtcgacaatctctggggtggccccataagctcatgtttattgatatggtttggctctgtgtcaccacccaaatctcatgttgaattgtaaaccccacatgtcaggggaggggcctggtgggaggtaattggatcatgggtgtggatttcccccttcctgttctcgtgatagtgagtgggttctcacaagatctgatggtttaaaagtctgtggcatttcccccctctcactctctctcctgccaccatgtgaagaaagcccttgtttctccttcaccttccgccattattgtaagtttcctgagacctccccagccatgtggaactgtgagtcaattaagcctcttttgtttacaaattacccagtcacaagtagtatctttatagcagtgtgaaaacaactaatacatttatactcttgtgtgatcccctgccctgagtgtcagtggggcctatgatttgtgacgagatgcacattattacgatacaaaagattgtaacctctcttgctgggtgtgaagaagcaagctgccatgttgtaagatgtcctatggagagggccacatggcagtgaactaagggcagctccagcctccatccaaaaaagatagtgaggccctcagtccagcagcctacaaggaactgccaaaacctatgagcacagaagatcatcttcccagtcaaacctcagatgagatcacagccccagccaatatcttgattgcagttttgtgaaggcatagagcagaggacccagccattctgtgcccagactcctgacccgtagaattatgagataataaatgtgaagtggcttaagctgctaagtttatagtaacattgtaacaccatcatacataactaatacagtcttagtttcccactctgaaaatgggcaaaatacaccacctttcagatgtacactcagccagtgggaaggaagccattctcctatactcagctgtactagttttctatagatgctgtcatagagtaccacaagcttagtggcttaaaacaacacaaatatacttgcttgcagtcctagaggtcagaattctgaaatcagtctcactgggctaaaatcgaggcattggcagggctgattactcctggggaggctctaaggcagaattattttcttatcttttgcagcttctaaattccatttttattccctggctcatggccccttccttcatcttcaaaacgagcagtgtagctttttcaaacccctccttccatcatcacatcacttttctgagtcttctgtgtccctttataaaaacacttatgattacattaggtcaacccagataatccaggatagttcgtaaatgtgtgcccttttaagctgctaaatttgcggtaacattgttacacagcaacagaaaactaatactgtgtgtactagtcaaagttctccagagaaacagaccagtaggatatatagagagatagaaaaggaggtttattatgggaattggctccaggacttataccaccgggaccacccccatccaggggaagttgatggtgtaactcccagcaagtcctggaatccaaaggcccgagaaccaagagcttcaatgtccaagggcagaagatggatgttccagctcaagaagacagagcaaattcgttcttcctccacttattttgttctacctggccctcaatagattgtttgatgcccgcacacactggtgaaggcagagtttctttactcagtctattgattcagtgctaatcccttccagaaaggccctcacagacatactcagaaatgttttaccagctatctgagtatcacttgaccccgtcagttgacacataaaattaaccatcatgctatctcaaaaccttaatttcatcacaggtgcgaattccctttgcctataaggtaacatactcaccagttcttgggattaggacgtgaacatgtatggaggccattattcagcctaccacatcatcacaccttaggaacacaaccaatgctagttaccaagacacccatattcattagtttgttttttcatctattctagagtgcctcctgtatgcctggcgtggttctggtcattgcaaataaatttacgatgtctgctctctagggggtgagaaaagaaacatctgaaccgttgtaaaaggaaattgaaagtttatatttcttcaatgcctaccatatgtgattagttttctattgatcctgtaacgtattacaaagaacttgtggcttaaaacaacacaatgtctggagctgctgccaccaagtccagatctccttgccatgtgcccccgatggccacccgatgtgcattcccgattccttttggtttgaagtccaatatggcaattctcaaggatcagctgattcataatcttctaaaggaagaacagaccccccagaatatgattatagttgttgaggttggtgctgttcacatggcctgtgccatcagtatcttagtgaaggacttggcagatgaacttgctcttgttgatgtcatggaggacaaattgaagggagagatgatgaatctccaacatggcagccttttccttggaatgccaaagattgtcctggcaaagactataatgtaactgcaaattccaagctggtcattatcacagctggggcacatcagcaagaaggagaaagctctcttaattgggtccagtgtaatgtaaacrtctttaaattcatcatttctaatgttgtaaaatacagcccaactgcaagttgcttattgttttaaatccagtggatatcttgacctrtgtggcttggaagataagtggctttcccaaaagccgtgttattggaagtggctgcagtctggattcagcccaattccgttacctgatggaggaaaggctgggtgttcacccattaagctgtcataggtgagtycttggggaacatggatactctactgtgtctgtatggagtggagtgaacgttgctggtgtctccctgaggactctgcatccagatttagggactgatacagayaaggaatggtggaaagaggttcaaaagcaggtggtcaagaatgcttatgaggtgattaaactgaaaggctacacttcctgggcctttggactctctgtggcagatttggcagagagtatgatgaatcttaggtgggacacccaatttccatcatgattaagggtctctatggaataaaggatgatgtcttccttagtgttccttgcatcttgggacagaatggaatctcagaccttgtgaaggtgactctgactcctgaggaagaggcctgtttgaataagagtgcagatactttgggggatccaaaaagagctgcaattttaaagttttctgaggtcacaccacttcactgtctaggctacaacaggattttagttggaggttgtgcatgttgtcctttttatctgatctgtgattaaagcagtaatattaagacagacttggaaaagcatcaattcctaaagttagaaagaggcatggtttgtaaaatcctacagctatatcctgatgcttcatggtactaatctcgcatagtcctataagtctaccacctttgaggcaccactgccaatgctgcaaatgctgcagttaccccttgagccagatggatgtttactgtgtgttatataacttcctggctccttcaccgaacatgcctagtccaacatttttttccaatcagtcacatcttaggatccagtgtataaatccaatattgcatgtcttgtgcataattgttccaaaggatcttattctgtggacgatatatatcagtcgtacacattgccgtatagtgcaaaaagaaacatctacatataaacaatgcaaccaactatccaagtgtcataccaactaaaacccccaataaaccttgaacagtgaaaaaaaataaaaataaaacaacacaatagatattcttatagttttgtaggtcaaatatccagcacgggtctaaatcaaggttccagcaggactatgttcctttttggaggctccaggggtcaatctgtttccttgccttttccagcttccagaagtcacctccatttttttgtttatgacctcctcttccatatcaaaaccaccaattgtgggccacaatcttctcaggttacaatgggtctggttctctctcttctgcctcccccctccacctataaggaccctstcgattacatcaggctaccgagatcatcccagatgagctccgcatctcagggatggctgatgagcaagctcaatttcacctgctgccctaattcccctttgccatgaacctaatgtagtcacaggtccaggagatcaggaagtggacatctttgggagccattattctgcctaccgcagcatgtcacacccactgatagcatttttaaagtattatctcatttagtcatcagaacaaccacgtaaagtagtactgtcatcatccctattttgcagatggggaaatggggtacatggcgcttatgtaattttcccaaagtcacatggctgatagtgattatatttgaaaccagagagttttggtctaaaaccccctcctataaacactgcaccatgttgtctcatatgtaatgcctactacatgccagtcctgtgctcttttataaactataataagctagcagtttccttaatttaaagaaacccttaactttcaagtttgcaacacagaatctccatcaaggaaggggtttgggacctcacagtcccaatcctcttgacttcatggatgatgctggtttctgctaccatgatccacctctctggcctaggggagatgggttgtcccccttagacagcctcacagagccagattaagaaccaacaaggccaggcatgatagctcatgcctgtcatcccagcactttggaaggcagaagtgagagcatcagttgagcccaggagttcaagaccagcctgggaaacagtgagacctcacctctacaaagataaaaaaaacattagccaggcatggtggcatgaacctgtggtctcagctaagctacggttgccccactgcactccagtctcagtatcagagcaagaccctgtctataaaaggaaagagagaaaaaagaaccaacagctgagcatgtctctgaagccatctatgagagggaccagatcattccagggagagtaagatggagggaattatatttagcaaaattatctcaagggcagtgtgacaggaaagaattctttgaggggcctcctggattgaaaaataagacccccaaaggcaggcttgatgatcaacagatggttgatctaatcttattagaggggcctgagttaattatagttttattttattctgtaaagcctgcaaatttgggccagagcagaactgttctgacagcaaaagagatatagaatcagggttcctacttccccatatctgccactcctacccccagatgaatatgaaggcaacatttagggaacatgagtttggaggacaaactctttgcttgctcagggcccctacacattttcgctgtctttacagagattcttccctttaaaatcccatagcacagttgagacatgaataaaaggttctattttatcaagatttttttccctaaagtccaaaataaatatggagaggaacataaaacagcatcatctcagcaggctatgtcatcctggcttctgacctgctctgcttaccatcttagcacccactgcccgaaagaccaccctgccagacacacctgcccttgaggaatgataatctgtagtgattcatgcaagtcccccgctaccagcccagggcccaccctccaagattcagcttcccagctgaagatacagctcttcatttgattaacactggaagggccttttagagataattaggtagtggggctcagaaacccctacaggaaaacaccatctccacctagcccctcattcataaaagacaaacacacacacacacacacacacacaccctaggaagaagaagaccacagaacacacacagaatccacacagtaactcctccgaataactcatcaaaatgagtaccattagctctttttacagagcagtaaactgaggctcgggaaacaacgtaatttctccaacccacgcagtaactaacgaagccacagtttgattaagctttctcagactacagaaaccacgctgcctccccatgataaaggaaaaaaataaataaataagtgcacacaactgttttggcatcagtaacccacacccttctcatttcactacttaatattcaaatgcagagaatttccacactggagaatcaaaagcccagagattttccctagaaggcctcagagcttgatttttcacaaatggccccaaggatggaaaaagtctcccaaattgagactggcaggagagcgggacccattttgtctgatttttcttctctcctttcttggcattagcaggcttagctcgcgccagtggaaaattcccaagtgccaagcagttctcagataatctgcacgcaaaacaaaacaaaattaaaaaaaaaagaaaagcctttcaacagaggcagctcatgaggggttaaggcgagcctgcagccaaaacatagattttttcagatacttgacgtctttttcatgttgatcaggaggtttgtgcccagccacagcctataatggcttcagtccatcactgagaccggtactgggtcagaccagagcctgcctttggactcaagagggtcccaggtccagatagtttgacctctgccaggctcaagagggtcccaggtccagatagtttgacctctgccaggcctgggcctggaaattccctgtgggaaaggacaggagctgcctgggagggctgaggaagaaggatctgtgctgggttggactcagggatgacagatagatggacagaggtggaatttggagagggtgagaaagaaagagagaaatattgactgtcgaggagtccctatgtatatcctagaagacaaaatctagtatagaatgctctattcataagacaaaagatgtattaatcctatcagagtgcaatcatattaacaataacatttgcatatagtcatttagccaatatttattaagcacctaagcatcaggcaagaatttgacaatgggcagagtagcctgggtgcctgctggcagagagctttcatcctcaccgtggagacatgcagtaaaattgacagtgacgtagcagacttcagtgctattgaaggggccatgggagtgcacaagacagggaaatctgatgtttatttggatttgatgtttttacaaaacatgctcccccactgcagttcttaatcttctaaaaaaaaaaaaaaaaccttgtaaggtaggcattactgtgttatcatcagagtcatcccatgttggagatgaggaaactgaggctcagagaagtggaggagcacacagggcagcccagaagctaggtgtgcctgcccttacgtctgagatgccctccttcgggacagcgccgggctcctctgctcacccgctgagggcaggtgggcagggcctgccgcagctggggctggcttactcctcgttgtgaggaagcaacctgcctgccatccgctcactcaagggtcttctcagcgaactcagtaggtctgagaaacagacatggaagactgagtcagacccaccaaggtgtcctctgatcacccctgttccccttgccttccccaggcttagcattataacaaccctgcttcccaggtcaggagatccctaggtagttcataaacacagcccagttctgtgacaccttatgccaaagacctgtaactcaacacaggctctacctttgcccacaggcatgggaagatgccttttcagagggcacatcattcttcccctccactccttcaatcctagcccctggggctagcgacgggcagaattcctggggaagaaggaccacctgagatagtacatcttggggaaggctgcaatgacctgttctcattccctctgccccaacaagttgtaaatcggagagagctgagttctaacctggcttcaccatttgtcttagctccagctgctataacaaagtaccacagtaggtggcttatccacaatggatgcctatttctcacaattctggaggccgccagtccaagatcaaggctccagcatggccaaggtctggcgagggcccccttctgggttgcagaatcctgacttctccttggatcctcacatggtggaaagaggggacactggctctctggtcccttctcataaggcacgaattccatcatgagggctcagccctcaacacctcatcacctcccaaaggcctcacctccaaatgctgtcacatagggggttagatttcagcacatgaatttgagcttgttggtgggctatgtaggcatctcttgacctgggaactgggatttttataatgttgtggatttcagcatatgaatatggacaggcacttgacccataaccccaccttaaacctgggtgacccttgctaggatctgttaccctttgagccttggctttcctacctgttcagtggcgacacctgctgctagttgagtggccctgagtctgtgtctggtgcacgtgtcatgggctcagcacaggctgctgttagggagttccttccctccatccttgacagcaaggaccacctcactccctagtcccggcacccagtgtcggccaggcatagaggaggcacaaggagcatttccttttgattaaagttagttcattttattctgccttattctttaccttggggctctgtgggaggggacctacgtgggatttggccacatggccccagaccatgaatagatccattaggttacattttccagtctcagagatacatgcccaaaggaaacgaaaaccagaggttggagtcaagagacctaacttctagcttggttcaaattccagcttcatcacttgccagcttcatgagtttagcaagtcatttgctttttctgggcctctgtttctcaatcacaaggttgggtcccaaagcactactcctccctgacactcccagaggtctccctagttcaagaacaggccaggagactccctctgggtctgctctcctctatcctctatgttgggggccaatgctggtttcagagccgtgactcttcaccaggaccgtgtaacctgaagcacatacagaacctcttttaaaatgccctgggatggagaccaggtagcttctgggatggaaaccaggtggtttccacatacaccctgcattgaaaactgcagagcctgcaataaattaaccaagcctaagctggaaagaaacatc

SEQ ID NO: 93981 - DNA, 28919 bp, Homo sapiens
  misc_feature (1)...(28919): n = A,T,C or G
aggcactccagcctgggcaacagagtgagactccatcaaaagaaacaaacaaacaaacaaacaagtgttcatcaatccctagcctaagtcaggctctgggttatgagtcctaatatctccttgaacttttcctccagcactttcatagtttgtaggtatatatttaaatgatcatttaataaatacatgtccccctcactagactgagagcttcacaaggaaactattttgttcactcttctatccctgataactagaacaattgcccggttcctggtcacaaccaggagatatttactgattcagtgagggaatgatctgatcacatttcatcctaatgatctttttacatttttatctactccaccagtggataaacttcttcatctttttgtctccagtatcttgtacggttctaagcacaaagtaagtgctcaataaatgttttctgaactaaagcaggaactgtgtaagcattttctgtaatcactgtactaaatttatgatactcgttaccaatctgaagggttatctggcaaaaaaaacaaaaacaaaaacagctggtgtggacaaacaggaaacacctggatgtggccaacagccaccaagatgtttgaaataatatccttcaatgtgtgaggcagtataggaatgaaaatacttgctgtgactgtagcaacagtgatcataaatataaaggtgggcacccaactggtataccttcaaattgcaagtcatctactgctgccattcggccagtgagtcttctcccaattatgaggaagaaaatttgcagggktctawaagaaaaaaataggtaaacataataggatgacagtataaagtatctgcaaacaactcttatgtattagaaatggtatcactttcccttgcctcccttttcagtggggtttaataggtttatataaagataaccactaagcatcaggtattattaaatattaaaactgtaacaaagaaactaaccccggggatccaaaggttccaattcaaccttatttggttgtgtatgtaccaggaatgaatctcaactcactgtgtgaatgtttagagascaggtgcagcctagagatgtaacgatgaggaaggagaggctgaggtttgaaagaggtgatggggacagtgaagaacaaaggcagttcagcctagccagtggttaagggcacaggctctggggtcagacagagctgggtttgattcccgattctgctgcttctctgctgtgtgcgcgctcctcgcggcctcagtttcctcatctgtaaaatgggtgcataacgatacctagtcacacagtgcgggggtcattaaatgggagtgcgtgtaaggaacctagagcggagtcaggcaattagtaggcaatggggtgtcggcgaccctgcagcccgggacaccgcgaagcagaggcagtgtttcagggagaggagctgggccgcggcggcccgggcgggcaggagatcctgaacccccttagcctcgtacaggtcccgcaaactcggcagcctcacctcgcggggttaggcgtcccccgggtcccgagaaggctcgggcctcagttgctccgcgccggtttcggtccagcccagttgccggaagccggagatccggggggcggaacctctccgcctcctccgggaagagccccgcctccttaaagagacagcagctcccagagayacctgcgtgctgcggcgcgcagagcccgctcccgcccgcccttctcccgaggctgagcctcgagttcttaaagagacaggcgagggcggagyggtggggtcgctgagtgtgactacttgggctggccttgctccagggaacgtagaaaattctcgagtttagggttttcttactgtgtgtttatacctcttttcctaaggaaatataaaatcgggtgatgaaagacgattgtgaaagaaaaaattaagtcacccgcgtcaccagtccctcagtttcttttggccacaaaaatttcactggtgagaaagtacatgatgagtcaattacattctgaatgagtgatcgaaagcgcgatgtctgttcgtatgagcacccccagtaagtgagcacttggaaagactttacatctaataatagccatatatagtgtatttttttccccaagattatcatgatcaggctttgtacatgcaggatctctaattctcagaacaatcctgctatcttggggtgattatcctcattttacaaagagaaagctgaggcttagaacatgtgcagggcacttttggttgagtatgtaccaggaatgaatctcagttcatgaattcagctgtgctagtatatcagccacctcttatgtcccatttcagatcatcttggcctcacctgctgcttatttcaccgccactcatcttattccagcgtcagcagatataacctgagtgagcttgcctccagtctatgcctcaggcttctcactttctgcttcgaggcttgtttcttgatgcgttggggccatgggaccttgctggagccaatcagcacccagacaggtgcatcccagaagtgtaggggtagagagttgttaatgtctcatgaggcaaatctctgaccaatggggtcaacacttgatgaatatatgcttttcctgtttttccccctcaggcgccctttcatatagctttcaaactacctagcaggattaagcaaccaaatgcctttggaagtgacgcatttgacaatgcatcttcgcaatgggtctccttccttccctgatatacaagccctgtacttcactcctggtgcttggattcatacttgccaataaactactcatatgaggaagcaatatgaaggcatgttggtaccaaaagtggccccagaaaataaaaccttaggttggcattttctaactgaactgcgcaccagtcacatggcaacaacaaatatattgctggtgttaaggggagagagaaggaggggggtggtggtggtgtgataacacttagaatagaatggcatcacaattactaaggtgtctgtctgcagttgattgggataacgtgcaggtagaagataaggtgctgagttatctagtggctgtggcacaggaacattaagaggacaatggtaattataaggactatggaatggactgggtgttcttaactccattggaaaccttgaaaataaaatgacagacttagaacagccaactgtcaacttgaggcactttgtgaaagctagagagcctctatggcagctttgaagattcttattcttctatagccttgagaaagactggactgaaaatcaggcccaagatctaattgtaagggtggcaaagtttcaacgaagactgaatgcacagcctctgtaggtctcctccatcaaagctggggcattgtcagaaaatgaatgggaacctgagaactgggatgaggatatttgggtaggaaagcctgagacttgaccatccctcgtttccagtttcccttgaatctttcaagggaaaggtggctgtggcagaagtagtcctttcccccttgttaaaggaaagcaaagtcctcttgcttacggatcctgcaatgattacctgcacaacattgctttggactaagggaccaatttaattgtaaagaacatgcaacagtgacacataaccatgggtcttacccactggtcttaccatgtgactcagtcatccaatagtaggtggcctaataggatggtggaatggcttgttaaaggcacagttagggctccaggttggggaaaatactcaggagactggggcattgtcctccggcatgtagtacatgtactaaaccaatggtttatcaattatttataatggtactttgttctaaatacctatagatttgcaaaccaaggggtagcacttcttactatcactttcagtgaaacctacacacatagaatgtgtgcctcctgcgtcacaagtttaagttctgcttggttggagatcctggtcccagggaagcagggaaggcggagagagaacacttccattccagttacagttccactgaattggaagctgtaactaccacttaggcatttttggcttctcataccactgcaccagcaggtaaagaaaagagtgccggctgggcgcggtggctcatgcctgtaatcccagcactttcggaggccaaggtgggcggatcacctgaggtcaggaattcgagaccaacctggccaacatggcaaaacccatctctactgaaaacacaaaaattagctgggcatggtggcacacgcctgtaatcccagctacttgggaggctgaggcaggagaattgcttgaacctgggaggcggaggttgcagtgagccgagattgtgccactacactccagcctggacaacagagcgaggctctgtctcaaaaataaataaataaagagtgacacatggtggggaaaatcagccctgattactttaagaagttgggggctgggcatggtggctcattcccataatcccagcattttgagagatcaaggaaggaggattgtttgaggtcaagagttcaagaccagcctgggcaacataaggagaagctataacagtcacaaaatttgccgggtttgggtggcactcctgtagtcctaactactctggctgaggtgagaggatggcttgagcccaggagtttgaggctgcagtgagctatgatcacaccactgccctccagcctggtgacagaggaaggaaaccccgtctcaattatttaaaaaaaaaaaggtcttgggtgtattttaaaacacttcccaactctgagctctatgattcttctttcagtttctccaatgagccatgctgtctctggcttctgggcctttggccatgtggttccttccaccaggacactatccccactttagccagctgactgcttgccgtctttctggtttcagcatagaaatcacttcctcagtgaagtcctcttgacttctctaaccagaattagcttccccttctccctgctctcgtagcccacgcacaccctccgcctctggacttcatttaggaaatggtagttttttgtttacttgtctattccccgcactagaccatgacttccttgagagaagagggtgttttatttgtcactctatgcccagtgctaaggggagttgcaggccccaggttttgttagaaatggtcccagttctgtctctgccctgggaggtttgagatccatatcccctggggagggctctgactacagaaatagtcaaccaccagctagaagccatgattgggggccgggtgcggtggctcgagcctgtaatcccagcacttttggaggccaaggcgggtrkgtcatctgaggtcaggagttcaagaccagcctgaccaacacggtgaaaccctgtctctactaaaaatacaaaaattagccaggcgtggtggcaggcgcctgtaatcccagctactcaggaggttgaggcaggataactgcttgaacctgggaggcagaggttgcagtgagccaagatcgtgccactgcactccagcctgggcgacagagcgagactccatctccagcaacaacaacaaaaaaccatggatgtttgttgggaaaacaaagatctttgttgggaaaaacatctttcattagtaaaagaagagtttgtgtataaagaataactaatagccaaatctactgacttgtgagagagcatctaacaggttctctttaagtgtggtctttttaagtacttgttttttaaaaaattaatcagagggagaatttaagatgtggaatctaccaatccaagaatctctcaaaagctcaggcaaagaattggaaatgataatgattaaaacagacctttgtgcacctggttaggaattttctatctcatgacagaaaggcaaacatcttctgacctgactccttcccctgacccggggttggctgctcctaccctgcaccttcattcagctccgcccagtgttgcctggctgcagcctctctgcccatagaactcagagcttactctggctttgccgagatggggctgccccagccagggctgtggctgaagaggctytgggtgctcttggaggtggctgtgcatgtggtcgtgggtaaagtgcttctgatattgtttccagacagagtcaagcggaacatcctggccatgggcgagaagacgggtatgaccaggaacccccatttcagccacgacaactggataccaacctttttcagcacccagtatttctggttcgtcttgaaggtccgttggcagcgactagaggacacgactgagctagggggtctggccccaaactgcccrgtggtccgcctctcaggacagaggtgcaacatttgggagtttatgcaaggtcaggaggctgccacacacttgaggggtgcttgaaatagcagtggtagagggggatgaagagatgggttggaaagtcctgaattctcctactacttttgctgctccttttggaccttcttgtcctcttcctgcttcctgaaactagaacttcttgtggattgtttctctaagtaacatcaccaccttcccaggcactcaaatcacaaaccatccagtctggcatttcagcccctggaacactgctsttactgtacaggctgatctgcctgggctgctctttgcccacctctctgcctggttaactcttgttcaatcttcagactgttgctcaatgacgcttctttcgagaagccaagcccaactctcccatactaggctaccctctctcatctgcctgcttaacatcctaaacttttctttattacacctgtcgcggtttgtaattatgtacggctggctaggattcatgtctgcttccctcactagtctgcaaactcaatgcaggtcgagaccattgctctcacccactattacacccatgcctgatggtggcacatggtagctgctcagtaaatacttgttaaagagctctcggctgggcgtgatggttcacgcctgtaatcccggcactttgggagattgaggctggcagatcacgaggtcaggagttcgagaccatcctggccaacatgatgaaaccccgtctctactaaaaatacaaaaattagccaggcktggtggtgtgcacctgtaatcccagctactcgggaggctgaggcagaagaatctcttgaaccccrgtggcggagattgcagtgagtcaagattgtgccactgcattccagcctgggcaacagagtgagacgctgtcacaaattaaaaaaagtctcagttttctctctctaactccatccactccccagtccaggaaaaccagtttcgtcgacttgagttcttgaccgttccagttttctcttttttgtcctcccagcttctcttcctgccagaacttccttytccccgacttgcccactcagccagcccagcttgtgaatggctgccagaytgctcttctctgagtacataccagctcaaccactttcagcagctcccctctgcatttaggatgaagcccaggctcagccttggattccaggtcctccctggtcaggctccagcttttcttctcaattctacctctgagctcccckccacactcatttctttcggacaaactgttgggccttgtacatctcttgtactttcccttgtctttgcctttgctgacatcggctggtcaagaatgcccttcccctctccatcgtcgtctatatccccctcattcatgtgggtccagctctcctgacaccttgtcctccatgaagccacctcagctycctacagctaggcatgtgcwctctcccttcggctcatggctctctgtctgcacctctccttggacactgctgcttcctgctcagcacctggtacctaagcacaagtcttatttccctgcccagtggagagcctcaggagagggtgtgtgtctgatttatctctggattcctcagcatgctcggcccagggcctagatgcagcaggtagagaaggcacctgaggcagttggtttattccgtgtttttcttgtttttctttttctctttttttttttttttttttttttttgagacagagtctcactctactgcccacgctggagtgtaggggtatgatcacgactcactgcatcctcgatttaccaggctcaagccatcctcccaccttagcctccttagtacctgggacaacaagtgcacaccacaatgctcggctaatttttgcattttttgtagaggtggggtttcaccatgttgcccaggctggtctcgaactcctggactcaagtgatccacccacttcggccttccaaaatgctgggattacaggcatgagccactgtgcctggcctakcctgtgtttttgaaagaatgttctttagaacctaagttccacagatatgctttactatgtagtgttgcctggtcaaagtagttgggaaaccctgaatactatatccycctcctatgcaatttcatgtgcaatttcatgtgcacatgagtgtatgcacatgaggagtttacagttccatagaacagatggaggtaataaacaaatccttacagtcctatgaaatgggggaggctataaaaaaatagaacttttgcctggaggacttggaagttttcctggaggaggtggctctggaactaggtcttgaagaatgagtcagatttttgtagcctgacaaggaaaaagggaagagtgttttagaggggaaggcaggagcttcttttgttttgctgttcattcataattttaaaccacagtgcacaaatgacctcagtttattcaacaaatgttcactaattccattggtagtaagagcaatggtaataactaacttaccacatgcccatgtgccaagcactgtaacagaaccaggccaatttgctgaatgccagtcatctgcagttcagttccctgaaagycagcttgcctcatggccaattcatggaatgtacttgcatcatgtaactgtccactttcagtgaggcagtttacattttaaagactgttgaatttggtctgagccccgtggctcacgcctttaattccagcactttgggaggctgaggcgggcagatcacttgaggtcagaagttcragaccagcctggccaacatgatgaaacctcgtctctaytaaaaatacaaaaatcagccaggcatggtggcatgmacctataatcccagctactcagaaggctgaggcatgagaatcacttgaacccagraggcagaggttrcagtgagccgagatcgcaccactgcactccagcctgggtgacacagcgagactctgtcttaaaataaaataaaataaaatataaaataaaataaaaactgttcagtttgtctctgctccctgctgctgcagctgagactgaaaattggtaggagtgaccagttgcagtggcccatgcctgtaatcccagcactgtgagcggctgagtgggaggattgcttgaacccaggagttcaagaacagcctgtgcaacagagtggaaccctgtctctacaaaatatttaaaaattagtgggatgaggtggtgtgagcctgtagtcccagctactcaggaggctgagttgggrgggtcacttaagcccaggaggtcgaggcttcagtgagccatgttcatgctagtgcactccagcctaggtaacagagttaagaccttgtctcaaaaataaataagtaaataaaattaaaaatttttaatggtaagaggaggggactgaagcaaaagaaaaatctatttgcaaaatagagtttactttcagcacattaacccaaagtcccctgaaatcataggtactaacaatacggaaataaacaccatgggcctctgccctggaaggcctcataactcagagtgagagatggtgtcgtgacagggaagcagagggcactgggggcaggaaccctgttaagagtagggtaaggaggtggccaagggaaagcttcctggaggagaggatggtgtgctgattgtctagggacagtgaaaccttggggtgggtgaggaagaggggaatggaaagcagggcagggcagagaggaggagcagcagaggtctgagatgtggagaagcaacattcagtttggcacaagtggggtcccagaggcaggaaggggtgaaggatgaggctgaaggcatcatcaggaaccagagcttacggggccttgtgtgtcgtagctgcaggttgactttatcctgagagtactggtgagttctggaagggtttccaagcgagaartaaacatgatcagttctgcttattagaaagacattggccgagcatggtggctcacacctgtaatcccagcactttgggaggccgaggccagcgggtcacttgatgtcaggagttcgagaccagcctggccaacctgatgaaatcctgtctctactaaaaatacaaaaattagccgggcatcgtggcatgcgcctgtaatcccagctccttgggaggctgaggcaggagaattgcttgaacccgggaggtggagtttgtagtgagctgagattgcgccactgcactccagcctgggcaacaaagcgagactctgtctcaaaaaaaaaaaaaaaaaaaagagacatgttgtaactactttggaaacccaccaggccaccaaaaagctctgttgtatgctttgggtataaactctgaactcagagccagagacagagagacgtgaagaatctttactgataatctaaagcaaccgcttcgtttttgagatgcaaaagtccagagaggtgaatgactcgcttagagtcacacagtgagttcttagaagagccagaactagacttctgactctcagctcgtgcacttgctgctactggatacgacagcaggagctcagggaaactctcagccacctccagccctctgtgcgtccacacacrcacacacacacaatatacacacactcttggacacacacagaacaaaacatcgartaactggcatggtgtggyagaaggcaagttctggatgatttactttctggatacctgagagttaatctgaaattggcttcatttcagcccctgtttaaaatcttctaacgtctttccagctgtacttacaagtgttgtccaataactataaataggatttctctgctgacagatcctgacatgggggktaatttactggtctgggctgttttcccatttatacaaaggagttggacttgatagtcttcactggattctcgaaatggtgttctctgcactgtggtctgtggacatgggcagggtgccagcccccatgcacccatcctttacctctctgctgctgaggaaagcagagagcttagtttaaactttgccctcaatactgaccactgtacccaaccacactataaataattaaacaaatggctctgtctcttccagggtctgaatcagtggatgttgagtttttttcccaattaaaaacaaaatttcatacagctgatacttagagttgatcatgaccataagtcttttgggttctttattttttatttttattgagatggggtctcatgctgttgcccagrctggagtgcaatggcacgatcgtagctcacagcagcctcattcctgggctcaagcagtcttgctgcctcagcctcccaagtagctgggactagacatgtgtcaccacgcctggataatttttttttaagagacrgggtcctgctatgttgcccaggctttttgggttcctacctaaagagtgacagagtgactctctggggtcattggaggccagtgaccagccacttggccacaattgacctctgagctgccctcctgaagcctgggcctccttgtcacatrggtgagaaatcatagtgcagtcaaccagcagagactgaggccactcaatgcctcctcaggccttttaagaaaaagtctgacccaaggacaaggagaggggcttcgtatgtccagtgaaactagtctgctttcctctcatatgctaaaaattgagaatataagccaattttgtttcttcttttacttggccaccaggaagctcagagtcaaaatatagctcagttataacaaatgcatgggacctatggcctgtgtgtattccgttttcccctcctgttctacrcctcccagaggggcatgattaaaaaaaattctggccaggcgcagtggctcacgcctgtaatcccagcactttgggaggccaaggccggtgaatcgcttgaggtcaggagttcaagaccakcctggccaacatggagaaaccctgtctctactaaaaatacaaaaattagccaggcatggtggtgcacgcttgtaatcccagctacttaggaggctgaggcaggagaattccttgaacttgggaggcggaggttgcagtgagctgagatcacgtttttgcactacagcctgggtgacagaggaaaactccatctcaaaaataaaaaataaaaaaattccatttaatgtgttagtataggtgtaaggagctttaaattctttgcagaacacagagggggtatagttaaccaaataaaccacatgtaagttaagatgccctctactccccatctatctgcaaaccctgtcaattctgccttctccccagctccactgccccacactagctagcccaggcgcccattttctctctttttctcttatagagacagggtctcattctgtggcccaggctgaagggcaatggcacaatcacagctgactacagcctcaacctcttaggcttaatggacgctccggcctcagcctcttgagtagctgggactacaggcacaccctaccagggccagctaactttttttttttttttttttttttttttttcagagataaggtctcactgtgttgcccagggtggtcttgaactcatgggctcaagcgatcctcctgcctcagcctcccaaaatgctgggattacaggtgtgagctactgcatccagacccattgtctttcatgtagacttctccagtgccccctaactgcttatccctcactttcattttcactcttagtcctttctccacagagcagccagagtgatcttcaagtgtaaatctggttattacatggccctactgtagcagtcaggttctggcttgtaagcaacagaagctccctctggttttcttggtcacacacacatatgtacataaaggaacatactggaaaggtgttgagtgctttccagaaacaatatcagctggtcttgattggactgtcttttagcatcaatagttgggcctggatcctgctgtcattgtggttgccatgggaacccatcaccatcccttacaggagcaccacaactgggctgtggatgaattctgccgtctcaatgactcccagaatcaaagatctatgtggaagggtataattagcccagctggggtcactgcctgagccctggctgccaggggcagagtgcgaacctggcccttctgtcttccaaagagcaaggctgggcacactgtttcataaatagaatacaaaatagggaattctaagtaggaaggagagttaggagttgggcagccaaaactgcaacaaacaagtcagatatagtcaagtgcacctatagttccagctactcagaaggctgaggcaggaggatcacttgagcccagaagttcaaggctgtagtgtattatgatggcacctgtgaatagccactgcattccagtctgggcaacataacaagatctcatctctcaaaaaaaaaaaaaaatgaaaaagaaaatatgcaataatattcaccacccttgctttatattcctatgatagcccacatacctaggataaaatccagattctttacaaaggcttatgggagcctgcctgctctggtccatccctaacactccaacccttctcttgttgctctctatgccgggttcctgccagtggttttgtggggccttgaacacaccaagttctctccctccttggggactctgtgtgagtctctttggctagaatccctttctcccttttcccatggctggttctctcctgtttttcatttctcaggttaaatggcagctcctcaaaggccttccctgccccgcctgtctaaaataggtaactcctttatagcctctctcgtaacactgatcacaatttgaaacttcttcatttacgcatttacttacttttttttgcctgtctccccactaagcagacttcaaactgcacacagccagagagctgctggtctcattctctgccgaatccccagtgtgtggcagggagacttgcatattttaagtgctgaataaatatttgtagataggatgagagtatactacattctggagattcgaggatgaatgaggaacaggccctgccctcaggggacaatgagtaggggggtttgggggtatgtggacacttamacaggccatgtcacagtgcaagactagccatgctccaataaatgtatggtaagggctcaacaatgtcagctctggccgtaagaaaccacaggaggccagctgctccccagagttgtccttggtctaggatggggagttacagaaggcttccacccagggctggcttcatggacatgggaccagtgaatcacacagggacctacactcaaaagggccttgtccttgggatttaatgttctgcagcagctgtcttgaatttttgttgctgttgttgtttttagcacaccagagttgtaaagtatgtcttgaaattcttcataattttatctttgaatctgcattttgtaagtgaaaccctacgggacaatggagcatgccctgaggacttggagcctctgcttgcacaggctcctgccttccacagcctccctgccctccacagcctccctgcccctccaggacatgttctctaaggcccactctcccatccccaggtgctccttcctgcttccacccagtgactgctgccatctcctgaccccagagtgggcctggatacagacatgaggaaggtgggggtcaggtgtcacgtcccccagtgttgcatggcagctgtccccatcccgggctcgcagtgccatagtgcaattcgccaagtgactgagggtgggggaagcctcttgcccaccctttcccccatcaaggtacctagtatgttccttacagaggttgcaataccctgtgggttggggtggtgggcaggtgggaaggggccatgtctggctcaacttctgtgatgctgggcggggcatggcatgttggtctggtggctggagggaaagggaaatgcacacacactcggtctctggggtgctgggtagctgtgaggatctgctctcactctatgaataccccaggggagtatgacatcaaatagcaactaaaagacacgatgccaggtcaagagagggactacagaagattagaaatgtctttgtatttcaggctgggcacggtggctcaggyctgtaatcgcagcactttgggaggccgaggccggcggatcacttgaggtcaggagtctgagaccagcctggccaacatagtgaaaccccgtctctactaaaaatacaaaaattagccaggtgtggtggtgtgcacctggagtcccagctactcaggaggctgaggcaggagaatcgcttgaaccccggaggcggagtttgcagtgagctgagatcacaccactgcactccagcctgggtgagactccatctcaaaaaaataaaaaagaaacgtctttatattttaataaatttaatggcactttcccccactttttgaacaaggaaccctgcattttcatttggcggcaggcccagcaaattatgcagctggtcctgctcctagcattcactctctttgtggagctgccttcsgtgcctccctacttcatagctcagggaggagatacaagctcatagcaacagcttayatttatgaagcacctactatgggccagtaaccagtttaagcccttatctctattaatttatttaatcctcctaacagtgctacaaaggattattatgccccccttgtggatgaggaaactgaagtgctatgaatagaaagagcactgaattgagagttcagaaaccagaatgttcattttaactcctcactgacctgctgtgtgacctggagcaaatgtgtaaaactcagtttctttgtctataaaatggggggaaaaaatgaccaaccttgcagtattactaatcccatcgcatgacagaatggatgcatacctgccttataaactgcatgaaagggactcctcttatatttaaactgctatgcggcaactgcaggtggtccactgagaccacctaaaaaaacctctcattttagagaggagtaaaccagctccagcccctgctaagtcatgctctctaggtgtcggaccccagtgcctaggacccatcctggggtggggggtagggggaaataaaaataacagaattgaacwtaggagtgaaaatggtgcttgtaaaagaaagctgtgtgtagngtctcagtttgtgatggttgttgctgtttcaggtaataggccactggtgctgaattttggaagttgtacctgaccttcatttatgttcaaatttgaccagttcaagaggcttattgaagactttagttccatagcagattttcttgtcatttacattgaagaagcacatgcatcaggtacagaaagattctctgcctcttctacctcttcccactgtcttttctctctcccttttccccaggccccatctcaaggttgggaggtggaaggaggaagaggaggggagagggaaagagccactattcactgagcacccaccactcccaggccctgcactgggctaacctcacagtctgtgctttcaaccagggtacagagagcagaacacctggagtgacagggtctggctaggagaggattctaacattttgatcggataaatagggaagtcaagggagaagaactgatttgaacacatttacaaagaattcagacccaaaatgtcacaggtgaaatgacggccttatggctatttttttttttttttttttttgagatagggtcttgttctgtcgcctgagctggggctggaatgcaatagcactcacatggctcactgcagcctcaacctcctgggctaaatcgatcctcctgtctcagccttccaagtagctgtactgcaggcatacgccaccatgcccagctagttttttgtattttttgtagaaacagagtttcaccatgttactcgggctggtctcaaactcctaggttcaaacaatctgcccacctcggcctcccaaagtgctggaattacagtcgtgagccactgcacccagcctatatttgtatttttgaaagaacactgtggtgaagaattaggagaaaaaatagtacttaaactcagtatgaattagaatcatctggaaggctgttaaaacgcagatgtctgggtcccatttctagtccatccacgctgacgcctagggtttgcactacttaacaaacttccaggtgacgctgatgctgttagtctggggacacacacttagagaactactgatctaaacccttgcctctccaagtatggtctaggcgccagcagtcttggcatcctgggagttagatggactctcagttccaccttcgacagaccgaatcagaatcttcctataacaaggtccccaaatgattcatgcacattcaagatcaaggagtgctggtttattggactatttcacgttgaagagcaggggtctggcagacagaagccctgggcttcagttctggatcaatcactaattcctgacgtgaccttgcacattcaaccataatgggaaaccaggccaaatcattgccaagggctcctctgagaacctcagttaaaagtgaggggctatttagtctgcaggaagtgtgtgctgtgtcaatgggactcggtgcctggcctttctcttgtagatggctgggcttttaagaacaacatggacatcagaaatcaccagaaccttcaggatcgcctgcaggcagcccatctactgctggccaggagcccccagtgccctgtggtggtggacaccatgcagaaccagagcagccagctctacgcagcactgcctgagaggctctacataatccaggagggcaggatcctctacaaggtggtgacctggggacagggggcccagggagggcaaaggggcccagggagggcaagggcaaagagaaggctttgcatcaagcagaactggattcaaatcaccacccagccacttaccagccatgtgaccatgggcgagtgctttcacttcttggagttccttcaatttcctcttctgcaaaatgggaatgttggtctccacctcacsggggatgaaataatgcacacgaatgtccctagcatttggactggagctgcatcctcccggcttccttttgaacccagatgatggcccagtcctggtctggtttcaaactcagagacagagaatgttgtttttgttctctgttttttgggtttctttctttcttttttttttttgagacagactctcactctgttgcccaggctggagtgcagaggggtgaccttggctcactgcaacctccacctcccgggttcaagcaattctcctgcctcagcctcccaagtagctgggactacaggcgcacaccacgcccagctaatttttgtatttttagtagagacggggtttcaccatgttagccaggctggtcttgaactcctggcctcaagtgatctgcccgccttggcctcccaaagtgttgggataacaggcgtgagccaccgtgcccggtctgtttttgttttatgaacaatgttcagagaggggaattgacttgtccaaggtcacgctgggcaaggctctgatttcaattctaaagcccttgatcgggtgggccagaaatgagaaggtctgaagctgctaacatttgcggcaggcctgaaccagggctggcggggtagaagtctcaaggggaatggaacccgtggtttggagctggaaatgctggacgcagggatgtgcggcagaaatgcatttcaggctccctttcttgtgattgcttcctctcaaaagttccagcctggtcagggtgagggaggtaagcacagcctctgactctttagacacagttggcttggcctcccttaagaaggtagaaactacattttaaagctattgaagggatttcaagccttggagagcagatgaaaccaagtatgtggatgctcctctgtccacagatcaagatcaagctgaccctacctattcagataaaacaagcaaaaacttgcaggcaaattcccaaggtgcaagggtcacagtagaagaatgtgggtccttcatcctttcctktaccttgggacatggttcaggcatgattgaggcaccctgggcactgaatccctaccttgggttaggccctgtgcaaatactggaaacacaaaaatgaattgaaaatgactcatacctagccgggtgcagtggcttacgcctgtaatcccagcactttgggaggccgaggcaggctgatcacttgaggttgggagttggagaccagcctgaccaacatagtgaaaccctgtctctactaaaaatacaaaattagccaggcgtggtggcgcatgcctgtaatcccagctacttgagaggctgaagcaggagaatcgcttgtacccgggaggcagaggttgtggtgagcagagatcgcaccattgcactccagcctgagcaacaagagtgaaactctgtctcggaaaaaaaaaaaaaaaaaaaaaaatgaccggccgggcgcagtggctcatgcctgtaatcccagcactttgggaggctgaggcaggcagatcacgaggtcatgaattcgagaccagcctgaccaacatggtgaaaccctgtctctactaaaaatacaaaaattagccaggcatggtggcatgtgcctataatcccagctacttgggaggctggggcaggagaattgcttgaacccgggaggcggaggttgcagtgagccgagatcgcaccactgcactccagtcttggcaacagagcgagactccgtctcaaaaaaaaaaagaaaaaaagaaaatggcccacacccttacttcaaggtactcacaggctgagggataaggaagacccaagtaagactattacagtgtcccaactgctgggggactccagagcaggggtcagcacgccttttctgtatagggcctgatagtaaatattttcaactttgtgccaagtaatccctgtcgcaacaattcaattctgctgttatagcacaacagcagctgcagacgacatgcaaatgaaagcatgtgaggcatcaggactaacctggctctcagactgtaagtttttcaacctctggggaagggtaggcttctcagagggggcagcaattgcttgggccttaaaggataaggagttggcctagtgagcacagtgagtgaaaatcactgcggtatagggaagagggtgggtggaggcactgaggcatagtagggcagagtgtgaataaacgattggagacattggggttacacaggggtctcattctagaccaaggggtttggtcttcatcttagggcaaaggagagccactgacgggtttggagcaggaaagagacatgatcggacctgtacttagaacgttcactggctcacggctgtaactctagcactttgggaggctgagccgggcagatcacctgaggtcaggagttcaagaccagcttggccaacatggtgaaaccctgtctctactaaaagtacaaaaaaattagccaggcgtggtggcgtgtgcctgtaatcccagctacttgtgaggctgaggcacgagaattgtttgaacctgggaggcggaggttgcagtgagcaaagattgtgccagtgcactccagcctgggcgacagagtgagactctctcaaaaaaaaaaaagaaaagaaaaagaaagttcactggttccatggccgggcgtggtggctcatacctgtaatcccggcactttgggaggccaaggcgggcaggtcacttgaggccaggagttcgagaccagcctagcccacgtggcgaaaccctgtctctactaaaaatacaaaaattagccaggcgtggtggagtgcacccgtattccctgctactcaggaggctgaggcaggagaattgcttgaacctgggaggcagaggttgcagtgaatcaagattgcgccattgcactccagcctgggcaacagagcgagactctgtctcaaaaaaaaaagaaaaaagttcactggttcctggttgaaaaatggacaggagggagcagggactaaggactggggatagctgggaggggtggcagctgcccaggctgtaggatgaaaagggctgacctagggcagtagaactggagaggcagagatggttctgaggtaggatgggtagaacttgatgtgaaggctggagaagattaggccagtctgaaggtctgattatggaagaaaagcttatttgtacagaacccttcyctttttgaaagactatgtcactttatgtcctctagtttttctacttctctgtccaaccttcctgttaactgctgatgccactgtacacactttctcaaccacctcacggttgcatctgccattgaattagccatgctgatggctcctacacagacatcatttgaccacctcttgcaactaacctccagacctacatgttccttacaacttggaaatccttanaagttgggaatgcctgattcgtttctcttgcagggtaaatctggcccttggaactacaacccagaggaagttcgtgctgttctggaaaagctccacagttaatctggacagatacctcaattctaggtgaycaacgggagggcttctcaaggcttagctctccctgagacccagctggcttttacccttgacctgtgtccctagctgaatcactagctcagatttttctgatctaagcaaacaactcccagctgaggaatgcaggccacagcacccaatcaagacaaattgttattatcagaaaatgaagcaacacttgagctgttcaggccagttccctgttgaagaaacagttccctgttgaagaaagtagagcctgacactgctcccactttggagaccacattccctgcacacggtctttgagagagcagttgcacwctacaggcacacttctgaggtacggtatctctctccagccactctgataccaagtaattcaagctggcattccttctattagggaaattcattttacccaatttgcatttatggaattgatcatttaagacactaaattagtttttagaaccaattatgggaagaattccagttgttaggaagagatgaggagttggaagaggagggattagaaacaggaggaggcagtcatcctctccttgccaaaagatttaaacctgtccacattggtggtgatgatgggtgagtttccatggtaacacatccctaattttaccagggaagaggagagtactcactttaccatctttgaatatatttcatagaaatctagctctctgtaccctgaaatcttccactagcctcacttttcaacagagtcatctagaagggagggttggcttcccaaaagcataaccttgaccaaaccaaacaataggcaccagcaatgctgtcattcagttatgcagaagctcatttgtgaaattctgtttctctgatttcttcgcaagtctcttaatggtcatttgtgttagattacatcaaactgatggatagccattggtattcatctattttaactctgtgtctttacatatttgtttatgatggccacagcctaaagtacacacggctgtgacttgattcaaaagaaaatgttataagatgcagtaaactaataacagaattattaaaatatatcaggctattttggatggcttccgtgtgatctttacattttcttttccaatttgtatctgattacccagtgtaatctgaccagcaaaaataccatacgctgaaagggcctcattttgggggaagaacattcaggccctatgttacatgttaaatgtggttttgtcttatgaactcctgctggagtgaaataatttttcacattggaatcaaattacctttataacatgacataaaagaatggatcaggagaccttttgctagcatgagaacatattctctttagctatactttagttgctacaaagttaatattattaatgttgtcactttattattttaaaaatagttattgcaagaggctgaggcaggagaatcacttgaactcaggaggcagaggttgcagtgagccaagatggtgccccttaattccagcctgggtgacagagcgagactccgtaaaaaaagttattattaatcatctaccaggcacagtcactttcagatatgttatctcatttaatctctatatatctcaaagaggagatgattatccccattttacagatgaggaaatcaaggctcagagagttaagtaacttgcataacttctcagaactagtaagtaacaagccgagattcaaaccggatctctaacttcaaggccagagtcctagctctgttcctgccagctgggtgactttgatcaagctgccttggtatcttgacctataaaacagggtatcaatagtgcctagtccatagattcatgagtagagcactcagaactgtgcctgacttggagaaagtgtcatgaagtgttggctattattacgattatcataattattgtcccacaactgcttcctcgggcccttttttggggggttggaggtggaaggaggacaagacaatatggatgctgaataaaaattccccatcctaccaaagccactcatgaccaacataggcatgagtttgtgaggctatactgaaaatgagaagctgtgacaatgatgggactgaagcacagatgagcactcactgttcctcctaagtactaagttgcacaaaaggagacaggatgtaaggcaagcctcttctgaatcacttctctgatggtcttccaattcgtgtctacaaatgcacagaaatctccccattttcactaaataatagtagctggaactgaggagcttttcagaatgacaaaaatagacccccggctttccaattagattctcttcaacttaatgcatcaaacattgagcattgattcttttctgggtgcagagttatgcaaagatggacgaggaagagctgttgtcctccagcagcttaatctcacaggggaccagacatacactccaatgaccataactcaaggtggagtatatgttagagtgaagactaagtgctcagagggcacagaggagacagcaatcctctgagctgggtgaatccaacaatgctttttggagctggtggcatttgagctggtcttcaaagatgcccagtacttccataatttgggatgggagcctggagaagatgggaagggagaagggcatttcaagtgaggagaactacaagggcaaaggtgggaaaagggctatgtgcaggagactgcaagaggtttgggttcaattccaatccttttgttttacagttgctagccataggccagtgtagttcaatggttctcaaacttgggcatgcaacaaaatcacctggagggcttgctgcaacacagattcttggttctcatctccagagtttacgattcgacagatctgaggttgagctagggaatttgcattactaacaagttctcaggtgaggctgatcctgctgtcccaggaaccacactttgagaaccgctgctatagtaggtgttgttggtgctctgcccagatgccttttaccaagccattgtactcatgagccagctgctgtgagtgttggctgctaatggctcacagatgcactctttcctgagaatttgccctcatgacaggagctatcttacccagaaatacctgtgaaattatgtccttcacctgagtgtggcccacagccagtgactgatggatttgaaattccaaagccttttcccttgctgcaaggtggggcagtctacttctccggtgccagtcatgcttcagagctccctatgggatcagactgaggctagacttcagcagaagccatgtttaatttttccctctgcctgatcctgcttctctcacttccttagaggtttctcctgagagcgctccctcaataaatcactcttcaaagaatccttgttggaggctctgcttctagagaacctgacccagagcagtccccttctgggtcttttctgattatgagtcttcattagtggggcttgttatctgctgaaacatagtgtgggatgaggagtcaggtggcgcaatctgcaactttcattgacattcgctgtcttgagtagcctattattaactaaattccttcctttgagatggggctcagggaaatccccttcagttacactccctttactttggatgctttttcaccttctgctatggattgaattgtgcccctctaacccccaaaatgcatatgttgaagatttaacctccttttatttggagacagggcctatatagaggtaatgaaaatcacatgaagtcataagggtgtggccttgataagacaggaatagtgtcccttaagagacaccagagtgcactctctgcacacacacacaaagagctcgtgtgagcacacagcaaggtggcagctacctacaacgcaggaagaaagggttcaccagaaactatgccggcaccctgatctcagacttccagcctccagagtggtgagaaaataaatgtctgttgtttcagctacccagtttatggtattttgttacagcagctggagctaagacaacttccttcatcatgctttacctccagcagtctcctctggtgtatcctgcctgattctctccagctccatcttccctgccattctgttattaacctcgaggctctctggagacattctccatcctcctgagccacctgcagccctcttcaatctaatcaagggactgttggataagcctttcataaccatgacacgtttaataaagtctctagctttgagagaacatatgccagttctcagcttcttccttcaccaaaatcctcatttcacagtacttagtgagtgggcgtcccattttgatgttagggattatagctgcttccttgaagataaaatgtttttctttttataattctttttgttgtgaatgttttgagaaaggggatggagtaaaaatcgctttaccccatcatctttaaccagaagtatccatttttatatttataaacatatatatgtatatatataaaattcatatcccattataaaatgatgtttgtatatatcatactttctaatatatggctgcgtagtagtttccagtttttctgtcttataaacatcattgctataaactttgtccacttatctttgtatattcctttatctgattattaggctatatttctagaaatggaatttctgtgtcaaagactacatgcatgtttaaaactttgatgtacactgccacacactatctcccagaaggctatcagggtcaagttacaaagggttgctggaacatcacctagaaggtgaagcccacaaaggatgcctcccccagcctgacccctgcagagaggcattcctgagagagggctcaacaaatgcaatatgctataaaaaaaaatctgtataaatgagtgataaacacaattttcatttctgtaatatttctttgcctagacttggtacatggtaaaaaggtcattaaatttttacttttttatccatcgctttaaataagtatttactggtttaaactttatgcaaggcgctgtgataggcattggtccacagtaagtgatccaaaaattcatatattgttgactagctttattcaaagctcctcaaagattctacagtataaagagatataggcgtgcaaataaatgaacgatgttcacttattcagtcaacagatatttcttgagaatatatgtgccaggcactattctaagccctgaggatacagtcatgagcagaagcaaaaaaaccccctgccttggggagcttacattctagtgagagagatgataaacatgatatacatggtaaacagaaaaaatacgttagacagttataagcagggctgtccctataagggtgagagagccccgagtaattcaattggattaaatctcctactcaagaggatcacacctgaatgcaggtggcactgccctcatctttcaaaggatacttgggccatcattaatatcattaaaagaaaaaaatttaagtggaattttaatgatagaaatgaagagtcaggtataagaactcctaaatacagaacacagggtgactgcgtcaggtccctaacctaagaaaagaagaaaaataaaacagggaagaaagatttaatgtgtttgtcttgcgagggtaaggtgcaggaacactctaattttaatagggaggccagagaaaggcttattgagaaggaaattttgtgtaaggacctgatgtcaatgaggaagccagctatactgacaccagtggcaagagcactacaggcagaggaaacagcaaacacaaaggcctcaatacatagtacacacagcacagtggcagtcaggagtccatgggcaggtggagaaaaggccacatgaaagggaaagaggatgccagttgaggacaaatgagagtttaaaaaggtgaggggctgagagcagtggctcacacctatattcccaacactttgggaggccaaggtaggaggatcctgtgagcctgggagctcgagactagcctgggcaacatggtgaaaccacatttctataaaaatacaaaaaattagccaggtgtggtggcatgtgtctgtagtcccagctacccaggaggctgaggtgggagggtcacctgagcctgggaggtcaaggctgctgtgagctgtgtttgtgccactgcgctccagcctgggcaacagacctgctctcaaaaaaaaaaaaaaaaagaggtgattggggtagttcagcagtgaaatacaaaacaaagcaaaaaggtaaagctacatatcatatctattgcctgaaatgtggagtggtttaaggtgataatgagaatgagttttttaaagcctagaaaaatgaagtttaaagcatgctgttttcaaataccgtatatgaaatgggtgttctacagtcatcaattgtttcctgcatccacagaagacagagaaaaaagacttaaagataactcaccaggcctgtgccaaagaaatcaatcagataacctctggagatcccttttagcaatctgtaagcctcaacacagtgtttcttacacaaagagttattgccatttcaatttagaaacttggcaaaaagaaaatgctcagcatttcattttattgaacatgaacacaattgctataattcacattccttctcaaaaaccttaaatggttccagtgttacaagaaaatacctgaaagcctgtgatctagccgtaatgttcagttttagtttcactttttgctctactcagacttttttattcatctttccccaaattcatcattatgaatgactactcaccttcacatctcttatctggtataccaaggtggcttttgaaatgcctttcctactcttctccatttaaaatttgcttttccgggccgggcgcagtggctcacacctgtaatcccagcactttgggaggctgaggtgggcagatcacctgaggtctggagttcgagaccagcctggccaacatggcaaaaccccatctttactaaaaatgcaaaaaaattagctgggtgtggtggcaggtgcctgtaatcccagctcctagggaggctgaggcaggagaatcgcttgaacccgggagacggaggttgca

SEQ ID NO: 93982 - DNA, 13051 bp, Homo sapiens
atgtggttaaaactattttaacaattcaaggcagttttgtgcttttctgagaggtaaaagtttgtcactgttttagggaaaaaatcaaatgcaatgaaacagtaacacttacttagcattttaactacattttaaccaaagtatttgaattgtgtataaaggcgctctatcagataatctccacaatacaatcaggcaggaaggtataaatatctattttttctacataaacaacagctttaaaaatgagtattttttgtattaagttaaaaaaaaaatttgaaatctcaagactttcagactggtacttaaaactccataggagccgggcgcggtggctcacgtctgtaatcccagcactttgggaggctgaggtgggcagatcacgaggtcaggaaatcgagaccatcctggctaacatggcgaaaccctgtatctactaaaaatacaaaaaaatagccgggcgtggtggcgggcgcctgtagtcacagctactcgggaggctgaggcaggagaatggtgtgaacccaggtggtggagcttacagtgagccgagatcatgccactgcactccagcctgggcgacagagcgagactccagctcaaaaaacaaaaaacaaaaaacaaacaaaaactccataggaaacttgtaatccttaagattcaccataaaacttaattgagcataccaacactgacatttgatgtgagaagaaatgtactgtgtgtttaagttttcactgatgaaaagaaatgatttcggaaatatttttattactggagggacagaaaaactgaaactctgagaaagaaaattttagctcatctaaggatttaaaaaagactaatcaattaaaagagtttaatgcctctattttaggaactgattttatcagtgttgaaataaattgagcattgctgtctccctatgacctgaaatgacctctatgtaatatcagatacatttaaacttactagaattacacgactaaaaaccctagagataaaaattatttagtatcaaattgttgatgtattttggggggcatggatgatttgaacttttaaaatctctataaaaatattagtggaactatttacctgatcattcataacgatcatggtgcgggtgaagagatcatgatgagtaattatgccagtaaaccactgggtggcagagtcttgtctatatactctcactctgtatccatttaaggaataaggaccttaaaaaaaacacaagaaacagaaacatcttaaatggagacatcttcatttaataactgccttttagaagaaacatgagctagtgtataatagtaatatatccaactatcagttttcaaaaaaatgttttagaagtaaatatcctttcaaatgaatcattctgaagttactatatacactgcactagacccacatacttcctgattcaatagaaataaaatactttaagagagaaggaaggtttctaggatcacgagttaataagagaacagttcaaaatgcaaagttatagtagtgtagaatgcagtaaggttatgaagctacttagtaagattgcagtagatgactacatggttgaaacagaaagattaacttgcaacttgatgtttgtttgagtcttctagttgccaaaactttaccataaacaactataaattttgatttgctatcacagccagaaaaagttgctaaaagtcttaaaaaagagattggctaagtgaatgtatacatatagcactaaaaatttttaacgaaatatggtacacttttgtgctaaactcactttttcaaaggatattcttgtatagatatccattagaaaataataaaaaatattaaacatatttatctgcagatattcagatatgcctaataaaacaagtcactctacagaagaggatactgagatgaaaacgatctttaattcacaggtattaaaatggtatcaaatactttaacaaagaactgtaagggaaaaaactgctgtaccttaataatttacaaagtgctttcaaaattttcaagtgcttatttaattctctctcctaagtattgttagcccttttacaaaaatcaagaaagtgagaggttgacagattaggtaaaattttaagtcaaagatctgggactgaatttatttttctgatattccttcttctacagttgtaacagattcaacaatcctttgccagctttaaatatatatatataaatcaatgaactgtagaaagtattccatatgacctgtaaattaaatactttcatctagagaaaagtgaagatgttgactggctataatttaagggaggtgatgcgtaaacactgtttagtagccatatccattatatgaacttcagtcttttctaactattgaagaataagactccatattattttttctaaataatataggacatgcttatagagtaactccaaatatgatcagttttcaattcccattaacaaacagtttacactggtttgttcccactacttaacatagcttagagtcagcctcacacaattctgcatagaatgaatagggactatactgccccttaatcttttctcctctaaggatacaatgcagaaacaaaatattattttttaaaaatttgcctggtttcttcaacaaataaattgcaaggaaagggaaaaaaagagcaacaatggggatgtaccaaataatcacaatgtgtggaccttttctgaatcccttgatttttaaaaaataaatcaaacctgttaaaatcttcgacgtttataagacaaatgaaaacttgaaatacctagtattttaaatttaaaaacaattacttttttcagaataatgttccagcattgttttgttcaaaaaaatggatagaatagggtgatgtctgaaatttgatagaagggggtatggatagcacaggatcagccaagatttgatagttgttggggctgggagagaggtgaatgaaagttcactgaaatattctgtttttgtatgtgtttgaaattctccacagaaaagtttaaagaatatttagcctaggaagaattaaatatgtagatgatccactactgtacatacccatataaagcaaacagctttgggattctctcttgatacttaatggcatggaagttgacggttgagatagatatgggaatttaacaacaaaattccattcacaaagacattcaacaacagttcatgccatattgtctcactttccattcaatttccaaaaagcttgtatttacaatacatgattttactgacagaaatggaaattgctaaaaatcgtcaaaccccactggtttgaaggtcacacgttgtaacatactaaacaaaggaaacaaaagactagtaatttctgaaaaaggtgcactgaaataggccacttttaccagatacgaagaacattcttcaaaggaaatcaattgtggctgtgggcaaccctctactgcaaacaatgcttccttctccaggaaagacacacctaaagaattccataatatgcagttttctgtcaacaaaacacctgtgtagctgtaatttcatgacaggcattcagttcaaataaagttaatacacttgtgaaattatcaactttctatcaaaattattatcactctgctattattttcctggatgtatataactcaaaatattggactgggccttctatttatattgcacacaattgaataaccaaaaacaaatatgataagttgcctagatccaaaaaaatttaatgcataacttcaaaatagttaccttgcataaaaatctcctgaaccttttgttcctttacccagactttcacttcctcatgaagctgcgggttgtccctgagaactgggtttaggctgtctatgtcgtcctagaattatagattaaaagaaaggtccatgttacgctctcctaccattaatgttaccgactttccctcctatacgttctaaggactgaataaaattcctttgatctaaatgtatgcaaaaacacaaattcatgagttatagttcattggcaattgtgtaacaaaagagcataagaaattaatctgtggtaagatttgacctttgacaacaatgtcctaaagtcaaaatttgaaattaatgtgttttctaacttttaaagtatagccttattcaagtcatctttttaagggattcactattggaagcaatatacaaatgaaataacatcaggtcatttaaaggtgttggcaaaagaactgaggtgaacatttgaatgacaatagatacatacacagatgacttactgaccttcccataatacttaacctctagactttgaaactacttttattctgtcctgatttaaatgtcatcaaattcagttctactcacagtcatctgaccagtaattttgctgctaaaaattttatttcttgaaactagcgccaaagcatccagacaattaaaattacattattgatggtattactctcataacaggctggatctagacatagaaacaaccaattctctctcattggagatgtgaatcatacagtcacgtgatttcccacaatttgctggtctcccactggactctgatattctgttctctctctctctctctcaaagtacctctgctgctcctgcatttgagatcagctgcagggacactagagtagctgagaagaataacaaaccagcactgtcaaatggcaactatttttaaagtggacaggcagggccgggcgcggtggctcacgcctgtaatcccagcactttgggaggctgaggtgggtggatcacaaggtcaggagatcgagaccatcctggctaacatggtgaaaccccatctctactaaaaatacaaaaacatattagctgggtgtggtggtgggagcctgtagtcccagctactgaggatgctgaggcaggagaatggtgtgaaccggaaggtggcacttgcaatgggccgagatcacaccactgcactccagcctgggcgacagtgagactccgtcttaaaaaaaaaaaaaaaagtggacaggcagatcatggaaacccgtgaatagaaaagagctaaactaagtgaactatatctgatgaataaaaaacaatttggcaactttgaaaagccaaaaggtagctgaagtgtaaaaaataaaaaaggacccctaatcaagtaggtcatacttcactcttctccaaagtctatccaggtaaagtgtttccttctcatactgctttttaaggcactactctgtatttttagaatagtattgtggtaaatattctatctgatatgtacttaaacatagtgaaagccaacaggccaaagtaagggcctttaaattaattatgttccttggaaaatacatagaagtactgctttacagcagaagaaaataccagaatgaaaaactgtcatacaaataagtaggcaaaatctgtcattttgggagaaagaaatgggcattaacatgtctttctttactttgcaaagaaactttctagcaatctcttttctctgcaccccctcaataatacagtacacacttagaaagtcctatcagactctaacccccttaatgcacaccagctgacagtctagtcgataacaaacagaacataggaaactttttgtttttgttttttgagacggagttttgctcttgttgcccaggctggagtgcaatggcacgatctcggcttactgcaacctccacctcccaggttcaagcaattctcctgtctcagcctcctgagtagctggggttacaggagcatgccatcatgcctggctaatttttgtatttttagtagagatggggtttcatcatattggttaggctggtctcaaactcctgacctcaggtgatccacctgcctcaacctcccaaagtgttggtattacaggcgtgagccaccacatctggcccatagaaaactattttacaaggaaaaccattactattttcagatatctctgacagcaagttcttttaaaatttttctcactttaaaacttccttacatagcacttccgccagggaggtcccccatctgcagtcatgagtcatttcaagtttatcgatattgttatcaacttgactgacaccatgttcagaggaatttataggggggttcaaaagcatcaagatgatttacaggatgtaacagggagagctgtcgagattggtgttaaaaagtttatgattacaggtggaaatctacaagacagtaaagatgcactgcatttggcacaaacaaatcatatgtttttcagtacagctggatgtcatcctacaagatgtggtaaatttgaaaakaataaccctgatctttacttaaaggagttgctaaatcttgatgaaaacaataaagggaaagttgtggcagtaggagaatgtggacttgattttgactgactgcacttttgtcccaaagatactcaactcaaatactgtgaaaaacagttwgaactgtcagaacaaacaaaattaccaatgtttcttcattgtcgaaactcacatgctgaatttttggacataattaaaagaaatagagatcggtgtgtagagggagtggtgcattcatttgatggtaccaaagaagcagcagctgctttgattgacttggatctttatataggatttaatggttgctcactgaaaactgaaactaatttggaagttttgaagtcaattcctagtgaaaaattaatgattgagacagatgcaccttggtgtggagtcaaaagtacacatgctggatcaaaatatataaaaactgcatttcctaccaaaaagaagtgggaaagtgggcactgcttaaaagacagaaatgaaccctgccatataattcaaatattggagataatgtcagcagtgagagacgaggatccactggaatcagccaatacactatataacaatactattaaagtattttttcctggaatataattggtatatgtcttccactttccatcatgtatgtaaaatttcatagtaaaacttaccgatagtttcartaaagaaattatctgcaaaaaaaaaaaaaacccaaacaaacaaaaacttccatacataaccatccatataccttttccataatatagggaattataaactgttttttctgtgctgttttttttttttttttctgagacacagtctcactctcccagcccgtagtgtactgggcacgatcttgactcactggaatcttcgcctcccaagttcaagcgattctcctgcctcagcttcctgagtagctgggattacaggcgcataccaccatgcacaactaatttttgtatttttagtagagacggggtttcaccatgttgaccaggctggtctcaaactcctggactcaagcgatctgcccaccttggcttcccaaagtgcagggattacaggcatgagccatcacgcctggctataaactgttttaaagaagcattgccaacaccgtgcagacaagtacaccttataaaaccagttgactgtgttggaattttacaacttataactcatttatttatatcttatttattcaacaggttaaaataatgggctataaaaccagttgcctatgtttaaattttataagttataactactaggatatataatctatttcttcaacatttatttataaatattttttgttttgttttgttttgagatggagtctcactctgtcgcccaggccggagtgcagtggtgcaatctcggttcactgcaacctccacctcccgggttcaagagattctcctgcctcagcctcctgagtacctgggattacaggtgcccaccaccaagcccggctaatttttgtatttttagtagagacggggtttcgccatgttggtcaggctggtctcaaactcctgacctcttgatccgcctgcgtccgcctcccaatgggattacaggcatgagcctccgagcccagccttataaatattttttcaacaggttaaaataatgggctctatttccaagatcattaaacaatatacaaatatttttccaacaataaaccattaattatctagcggaaatagcataccattaaaaactgttaaattgagtccctttactgataatgactttatgtaggttcaaactctggtctctcaatctcctcatctataaagcagagttactaatatttccctctttttctatcttaataaatgttttaataagattttttcttatgtacaaaaattagctttcttaaaatatctaattctgatttatgacatttgagtgctgaatgatgtgaactacctggttaattaaaacccacaaaaagtatcccaatgcactgcctgatttatgacaggcattgttgttgaattcctccccctcgtctacatatagtactttgtaagttacagggatttctgttacatcatcattcccattttaaagaggattattaaaggttaaatgagcaaatcttgaaacaaagccaaataggttttttatatatatatttactgacttgaataattttgtaaaggtgctaaatgttagacagaagtcaacaaggctgacttacagataagagaaattaagggtctggaattaaaaactagctatgaatatccactatctttcacagaatttaaaaggtcttcagctgtgccttgagctcgtgtgagattaaaaatccacttaatgggccgggtgcgatggctcacacttataatcccagcactttgggaggccgaggtgggtggatcacgaggtcaggagttcgagaccatcctggccaacatggtgaaaccccatctctactaaaaatacaaaacctagctgggtgtggtggtgggcgcctgtaatcccagctaccagggaggctgaggcaggagaatcgcttgaacccaggaggcagaggttgcagtgagccgagattgcaccactgcactccagcctagagacagagcgagactctgtctcgaaaaaaaaagaaaaaaatccacttaatggcacagtcttcacatttcacactttaaagacagtaactataagtagttacctatatatagttcttatcttgaataactaatacctattaatttttcaaaaacaagtcacctaagctaattgaagagacaggaccctctatgaacctctcctcctatgtaaactgtatcctatttgagctactagttataacctccagcaaacgacaaatggaaaaaaatcagttcactaagcatctgctttattagaaatgtatacagaacacagaaaaagttcaaaaaacatcttaaatgaggtttgggggtacatcagtcacttgtgtgttgttcctcctcttgcaaagatagacatgaactctaattgaacattagtgagacaccttaatgtactgatacacaaaaatagctaccataaggccaggcgcggtggctcacacctataatcccagcactttgggaggccgaggcaggtggatcacctgagattaggggttcgacctggccaacatggtgaaaccccgtctctactaaaaatacaaaaattagccaggtgtagtgacacacgcttgtgaatcccagctactggggaggctgaggctggagaatcacttgaacccgggaggtagaggatgcagtgagctgagatggcgccattgcactccagcccgggcagcaagagcgagactgcatctccaaaaaaaaaaaaaaagctaacctaaaggtgcatttactatggcagacactatgctgggtactttccatacagtatcaattgtaacaactttgtgagctgatatacacagtatgttcagagaggttcatggttacaagcaggaagtgacagagctgttatctgaacttagttctgtgacttccagggctcaggttcttctcccccacccccccttccctccacatacactctctctcattagcacaatcaaaagaaatgaaagtttactattattgtcttttaaaatttgacacatttctttatatgtaaggggtaaaaggcaacattatcttataaactgaggctgactcaaaagcaaagaacaacgggtggaagatacctttctataaacttctaacactggttatgtgacattccacatatagaaatagtcaaatactcatcaaagagaggagacttagggtggcaaactcatgcaatcttataatcagaaagtgtaaaagagaagaaacctcactttggtgatgtaccttagtcatgatctacaaatacccaaatgctgtttttttctaggttaacactgtgctgaatgactgcttggatgatcaaaataaaggtattttttcacgtgtacaggaggggataatggggccgggtgcggtggctcacacctataatcccagcacttcaggaggccaaggtgggaggatcccttgagtccaggagttcgagaccagcctgagcaacatggcgagatgccattgctacaaaaaatttaaatatcagccaggcatggtggggtgcgcacctgtagtcccaactactcgggaggctgagatgggaggatcacttgagcccaggaattcaaggcagcagtaagctataatcgtgccactgtacttcagcctgggcgacaaagcacaaccctgtttcaaaaaaaaaaaaaaaaaaaaaaagagagagagaaggacatgatggagtaaaaggctgaaatcaggccgggtgtggtggctcatgcctgtaatcccagcactttgggaagccgaggtgggtggatcacctgaggtcatgagttcaagaccagcctgaccaacatggtgaaaccaaacctcatctctactaaaaaatacaaaaaaaatgtatttaggtgtagtggtgcgcatctataatcccagctactcgggaggctgaggcaggagaatcccttgaacctgggaggcagaagttgcagtgagcctagattgtgccactgcactccagtctgggtggcagagtgagactctcaaagaaaaggttaaaatcaggctggaatgtgtattttgacagtaagactactgtactaacataattttaggtgattatgtactttctacttaattcgaaagaaaaaaataaccatctaggtaatataaaacataagctcagaacactaaaatattcagatatgcctagttaggtttaatgacaccagtattatgaaaatgttaaaaatatacacaactcatttcctaagataataaggtagagtgctccttgccagttcaagaaatatattatttatgtcacacatagtctcatttgactgctgacaaaaaaccaacaaagggtggttagtttctaagtgacagagaagactggcttaataacgtaacagatttgctcaaaagtctcaactgatgtctagagtagcactttcattttaggataaaagaaatatcacaaaactgcagcagtttctcctcctttggacaatttctgatagataatgactgaatgctcactttcaaattgatactgatatgtgtggcttattaatggaatgattttcccctctgctataaaacccttgacctttgtggtaacatccagtgtgctttcttaaattccattccatgacataaatttctccataaaaaccatctttgatagtataagagttaccataaaagcaattattttgtatcctgaacatcagattaggtgattgaacatgttttgccataccagtttcgccagtcataaattcatggtttagcaaaactacaaatagttgcttgttcttagatccctgagattgctggcaacagttttaaaacgtgaatgttaagtccacaagagtgacattaatttttaccacaccacatctttttaacttataaaagaatccattttgctaataaggatttgctgggacaagaaatatataaagtttgaaagttgctacaggggtgctcaaaaagcaaagctgtctataccacctgcagttaactaaatgaaggtaccgctgaaggcttccatgtattttcatgaattataataagggctagcaaacattttttgtaaatggccagaaagttaatatattaggctttatgggccataccagttgtcacaactactcaaccctgctgttacagcagaaaagtagctaaaaaaataccataaaaatacataaatgaatgagcatggctatgttccaataaatgtttctatattagcattctatgaaatttgaatttcatagaatgtttaggtgttatgacatattcttctttttgagtttttttcaactgtttaaaaatctaaaagtaactggacacagtggcttgtacctctaatcctagctactcaggaggctgaggtgggaggatcccttatgcccagaagttcaaagctacagtgaggtatgatcactgtagtcactgtactccaccctgggtgacagagggagatcctgtctctaaaaaaattaaaaaggaaaagataaaaacaagaagcaggctggattagcttgtaggtacagtttgccttttcctaattaaaaacaacaaaacagaacaaccagtatgaagcaagattaaaaacttctacatcaatgtatcaaatacaattttaaatatactaatgcaatttgatctaactgactgcaaactcttatttccacaaatgcttgaaatatatacaatcaggagcacaggaaattaaatcaataccaaatccttttcaccagtaaagacaaaaatatcttaaggtaaatacattatttaaactttcacaagtaaatgagtttccctgatttattctggaaaatgcttagccttccaaatataacaatatacttgattttaatgtacataatttaggaaaaattatctaatttgcaagataagatttcctccattaggtcaatgactattacattcagagattggaatcatcatcttctctgggctctcaagtaaagtaaaaatgagaatatgcattaaaaagtaagagatattataaagatagtctacctgatttattaaggacacgatagattaatctcttaagctctctatgtaggtgtgtgtgtgtctgagtacatataaata

SEQ ID NO: 93983 - DNA, 12689 bp, Homo sapiens
tgatgtttagagatacatataaagtactgaaacttttttttttttttttttttgagacggagttttgctcttattgcccaggctggagtgcaatggtgtgatctcggctcaccgcagcctccgcctcccaggtttcaagcgattctcctgcctcagcctcctgagtagctggaattacaggcatgaaccaccatacctggctaattttgtatttttagtagagacggggtttctccatgttggtcaagctggtcttgaactcccgacctcaggtgatccacctgcctcggcctcccaaagtgctgggattacaggagtgatctaccaggcctggccagtactgaaacttttttaagggaataataacagcattcagggccagacacgatggctcacacctgtaatctccgcactttgggaagctgaggtggtggatcacctgaggttgggagtttgaaaccagcctcaccaacatggcgaaacccggtctctactaaaaaatacaaaaattaggctgggtgcggtggctcatgcctgtaatcccagcactttgggaggctgaggtgggcagatcacaaggtcaggagattgagaccatctggctaacacggtgaaaaccatctctactaaaaacacgaaaaattagcctggcatggtggcgggcacctgtactcccagctacttgggaggctgagtcaggagaatggcatgaacccaggaggcagagcttgcagtgagccaagatcgcgccactgcactccagcctgggcgacacagtgagactccatctcaaaaaacaaaacaaaaccaaaagaaaagacacgaaaaaaccagcattcaggggagtagatgaggagcatgggggtgggaagagaaggatgaagctggaggcaagggtgatggctggtgggtttatgggtgctcgcttcgtattatgctccataacttacatatatattttattagatatcatgtttatgtatatatgctacataataagaaggcaaggccgggtttggtggctcacacctgtaatcccagcactttgggaggccaaggtgggtggattactagagatcaggagttcaagaccagcctggccaacatggggagacccccgtcttggaggtgagaatggtttgtttagactctagactagcactgtctagtggaccgttcggttatgatgtgtattagtctgttttctcactgctatgaagaaccaccttagacagggtaatttataaaaagaggtttagactgggtgtggtggctcacgcctgtaatcccagcactttgggaggccgaggagggcgcatcacctgagatgccaatacaaaaattagccgggcgtggtggtgcacgcctgtagtcccagctactccggagggtgaggcacgagaatcgcctgaacccaggaggcggaggttgcagcgagacgagattgcgccactgcactccaggctgggcgacagagcaagactccatctcaaaataataataataataataaggcattttaaaaaatgaaagcctgtctccaacgccctaacaaccaaggtttctactgcagcgacagtgtgaccactgcactaactcctacagggctctcaaaggcccaggcactgcaacgggtgccggtgcctggcctgaaaatcccagtcccagagatctgcgggggtcctccatgcttccccgggggccttgcttcccaccgaccacccttagaacaaacagcccatctgtgcacccttctccctcctctccctgaccccctcgcctggtgtactcttccacgaagcagcatcatcccggattcacatttatttgttgtctgttgccacccagatgcgtgtgcagaatatggctctatgggagctggaccctggctgggtcatggcccaagccccgacgtgcacatgcctggcggcaagggggctcaggaaatactgcagagttaacagaagcagccgggggcctgtgatgtggatggagagaactggggctatcaacctgagctgctctcttgacagctgaaagcataggctatgttgctgtttttaccctgggtagacacgcctctggtaaatgtatgatttgttagatattttgaggtctggaaaacagtcatcagaccctcataagcaccttcaaggactctgatatggtttggccatggccccattcaaatctcatcttgaattgtagttcccataagccccacgtatcatgggagggacccagtgggaggtaattgaatcatgggggcaggtttttaccatgctgttctcatgatagtaagtctcaagagatctgatggttttttttttttttttagatggagtcttgctctgtcgcccaggctggagtgcagtggcgccatctcggctgactgcaagctctgcctccttggtttatgccattctcctcagcctcagcctcctgagtagctgggattacaggtgcctgccaccacatctggctaattctttgtatttttagtagagacggtttcaccatgttattcaggatggtcttgatctcctgacctcatgatccacccatctcagcctcccaaagtgctgggattacaggcgtcagccaccgcgcctggcccaatctgatggttttataaagggcagttcccctgcatacactctcttgcctgctgccatgtaagacatgcctttgctcgtccctcaccttccaccatgattgtgaggcctccccagccatgtggaactgtgagctcattaaacctttttttctttatgaattacccagtctcaggtatttcctcatagcagtatgaaaacggactaatacagacccctaggggtccaggatcccagctggaggtaaccattcctaggtgagccttaaagtactttgcaaagttaggattccgcatttccacggcagggtgacctcctggggtctagggctcttcatcaccctcattggcatcatcaccgtcataatccagaccccagacagatgtgtctgaaggcagttgggtgtgagccaggagcccagcggggactgggctggaggtgtgaatagagaaactgccttcagcttcagcctcaaaacctaccacaggatcttaaccccaggtctgcactgagcagccagcactagtggctacttaacgtctgaaatacggccagtgtgacttaggaactaaattttaattttacttaacttttattttgagacaaggtctcattctgtcacccaggctgggtgcagtggtgcaatctcagctcactgcaacctatgactcccaggctcaaataattctcccatctcagtctcccgagtagctggaactacagacacccaccatcacacccagctaattttagtatttttttgatagagacaggtttcaccatgttggccaggctggtctcgaactcccgacctcaagtgatctgccagccttgatctcccaaagtgctgggattacaggtgtgagccactgcgcctggtcttaattttaattaatataaaattttaaaatggaagcagtgtaaatgtttttatattaaacacaactttattgctatagtaagactacatttcactctgttgaaaattgagcctctgaattgagatgtgtaaaatacacaccagattttaagacttggcacatacaagaaggtaaaatatctcattaataatttttgagctgtgtgtggggtggctgcacccttgtagtcccagttacgcaggaggctgaggtgggaggatcactggagcccagaagttggaagctacaatgagctgtgatcacaccactgcactccagcatgggcgacagggaaagaccccatctcttaaaaaagggggtggaggggttaaagaaataataattttgatattgattacatgttaaaaatggtactattttggatatattgggttaaataaaatatattaaaatgaatattacacctttttcactttttctaatatggctactagaaaatataaaattatatatgcagctctcattatatttatgttagacagacatttccatcatgatatggcttggctttgtgtccccactcaaatctcatctcaaattgtaatccccacgtgtagagggagggatctggtgggaagtaattgaatcatgggggcggacttccccttgctgttcttgtgatagtgagggagttctcacgagatccaatggttgtttttttgtttgtttgttttctgttttttgtttttttttttttttgagacagagtttcactcgtttcccaggctggagtgcaatggcacaatctcggctcactgcaacctccgcctcccgggttcaagtgattttcctgcctcagtctcccgaatagctagggttacaggtgcgccaccacacccggctaattttttgtatttttagtagagacagggtttcaccatgttggccaggctggtctcgaactcctgacctcaggtgatctgccctccttggcctcccaaagtgctgggattacaggtgtgagccatcgcaccaggtctaaacctcttttctttataaattaccctgtctaagatggttcttcatagcagtgagaaaacagactaatacacatcgtaaccgaaaggtccactagacagcgctggtctagagtctaaacaaaccattctcacctccaagcaacccggttcctcccacatccacttttgatttaagctccctgcctgggggccctaaccctctgattctctgaagctaagccctgccttcctccatgtgaagctgtcttgcctgtcctttcctgctggtaggaaccatcttcctcccttaatatccactatttataccagacttcagcacttaggcttggagaactaatttcctcttcagctcaatttttacattaaaggcagttaatacccttctctcttaattgagcgccttgcatataaggaatggtaactgatgattctaacagtattaatagcacctttttttctgtggtgctttacagctcaaaaaggatctgtcatctccccacaaccttaagagggaagacaggtagagattttcatagccattgtacacatgaggaaactgaggctctttgaggttattttgcacagatcataaggcttgttaatgtggcccccatttttccactgtaggccagtgctgtttcccctccatgtgcttttggtgcccacgtgaaaatgcagacagttaaaactgaatatagagctgggcgcggtggctcacgcctgtaatcccagcactttgggaggccgaggcgggcggatcacgaggtcaggagatcaagaccatcccggctaacacgatgaaaccccatctctactaaaaatacaaaaaattagccgggcgtagtggcgggcgcctgtagtcccagctactcgggaggctgaggcaggagaatggcgtgaacccgggaggcggagcttgcagtgagccgagatcacaccactgcactccagcctgggcgacagagccagactctgtctcaaaaaaaaaaacaaaaaaactgaatatagaaagaaaagactagcatggttggggaaactagggctgcttcgtgttagaggcaagacttgaactgaactttgaggaatgggcaagctttggccaaacaaagaggagtatgcggacttttggggacagaaccacagcttctgtgaaaaccaatccataaacagaattcttgattaacaaagaatgatggaattaaacatttggactttttttttaaaacaacagttttatcaagatatagttcatataccataaaatccccccttttaaagtatacaactgagtggcttttagaatattcagagttgtacaaccatcactactaatgtcagaacatttcactacccctaaaagaaaccccataccacagattccgatgccgccgggagccctgccatgccatgtcacatatattatagtatatctatgcccagccatggtcaacccaccgtgttctttgacatcaccatcaacagcaagcccttgggccacgtctccttcaagctgtttgcagacaagtttccaaagacggcagaaaactttcctgctctgagcactggagagaaagggtttggttataagagttcctgctttcacagaattattccagggtttatgtgtcagggtggtgacttcacacaccataatggcactggtgtcaagtccatctatggggagaaatttgatgatgagaacttcattctgaagcatacaggtcctggcatcttttccatggcaaatgctggacccaacacaaatggttcccagttttgcaactgcactgccaagactgcgtggttggatggcatgcatgtggtccttggcaaagtgaaagaaggcatgaatattgcggaggctatggagcgctttgggtccaggaatggcaagaccagcaagaagatcaccattgccgactgtggacaactctactaagtttgacttgtgttttatcttaaccaccagatcattccttttgtagctcaggagagcaccctccacctcatttgctcacagtagcctctaatctttgtgctatctctcagttccctttgggttccatgtttgccttattctcctccatgcctagctgkatttcagagttaagtttatgattatgagataaaaactaaataacaattgcaaaaaaataaaataaaaagaaagaagaggctgggagcggtggctcactcctctaatcccagcactttgggaggccgaggtgggcctaccaaaggtcaggagatcgagaccaccctggctaacacggtgaaatcccatgtctactaaaaatacaaaaaaaattagccaggcgtcgtggcgtgcacctgcggtcccagctactcggaaggctgaggcagaggaatggcgtgaacccaggaggtggagcttgcagtgagccgagatcgcaccactgcactccagcctgggcaacagagcaagactctatctcaaaaaaaaaaaaaaaaaaagacggaaaaggcattatatatttgtgaagacatggacagaaatgtgtcctgattgtggtgccacaaagcactgagcctactagaagacgtcagcaaaagatcccctgaaaagtgactccaagccattcactgcaagggatggttacacagatgcagaatacagaaggtcaatagtagcttaatgctacatcacagcttaacactacatcatccacctcacttcatctcaccccatcgtatcgtgtcactgtgctcaccatcacaagaacagggaggatagcacaggaagatattctgacagagaaagagagagaccacatttacataacttttattacagtatattgttataattgttctattttattattagttattgctaatctcttactgcacctaatttataaattaaaccttgttattggtatgtatgtataggaaaaaatatagtgtatatagggcttggtactttcttcaatttcaggcatccattgagagtcttggaatgtacccactgaggataagggggggctgctgtacatactttgcaaatatcttctctcatcccatgggttgtcttttcattttctttctttttttttttgagacggagttttgctcttgttgcccaggctggagtgcagtggcacaatctcggctcaccacaatctctgcctcccgggttcaagcgattctcctgcctcagcctcccgagtagctgggattacaggcatgaaccaccacgcctggctaatttttgtatttttagtagagatggggtttctccatattggccagcctggtctcgaactcccgacctcaggcgatctacccacctcggcctcccaaagtgctgggattacaggtgtgagccactgtgcctggccgtcttttcattttcttgatggtgtcattgaagcacaaaagttttaaattttgatgaagaccaatttatctgttttttctttcatcacttatgcttttggtgtcatatctaagaaaccattgactaatccaaggtcacaaagatttattgcctatgttttcttctaaaagttttatgattttagttcttacatcaaggtctattttaagtcttttgttttgttttttgttttttgttttgagacagggtcttactctgtcacccaggctggagtgcagaggcacaatcatggctcactgcagcctcaacctcttggcctcaagcaatcctcccacttcagcctcccaagtagctggtattatagacatgcgcaaccatgcccagctaatttttttgtagagatagggtttcaccatattgcccagactggtctcaaactcctaagctccagtgatccgcccacctcagcttcccaaagttctgggattataggcatgagccactgcacccagccccaaattttgtatatggtattagaaaggggtccaacttcattcttttacatgtggaaatccaattgccccagcaccatttgttaaaaatattttctttcccatttaattgtcctagtgttcttgtcaaaaacaattgaacataattgtatgggttcatttctggactctcaattctattccattgttgagcatatttttaagggctgtttttctctcctgtggtaactggtgacctgtacttcctggaagagagatgaaaagattcccaagccaactgagttacctcacgtgggtcaggtctctgtggctctctgcactggcctattcataatgatatcctcctgcaggatttgagccttctcctttgttgtgacggcagccgaggaggtggctgactgcccagacagccttatctctttcctacctttcaaggttattgtaaataccaaattagattgtttatacacaagaatttagcactaaagcactatacaaatgtaagctatttatttytatttatccttctccttcatgaataagaccctaaaaatagaagatatttttaatttttactcactgggctcaaggttgcagtgtctgtattattgcaaattccaaattaatgaagtctggctcttcttatattattcctgcaaaaggctgtgtgctcaccccccggagtgtgaatacgagtgtgggtcatttcctctttcctctgcacccttccttcgatgaggttttgccctgtgctaggcaccatgctaaactctgagaaaaccacagagaacaaggcagacgccatccctgccctccagtaacatacaatttagtgatgaagctgggggatttaacaagccattctaataaagcgttacagtgagggaggtgcagggtgatgcctccagcagccctggtgtcagctgctccaggtccaggggaagacttccattatcttccaaccctgtcggaagtggaggcggaggctgtttattgctgacacagtccctaacccagggtctatagacattgtggaaatgccttggagtcagacgggagaatgaaccagcagaagcaatgcccgccctccaccctcctgaagagggttctcaggaactctttggaggcgaggccagcctctggctgagggcctctggatacaggttaggcctcaggctcttctcctctctactcatctctcctcccttggcccctccttcagaggctgacagagccccactctcatctcttccccacccaagcctctttccacagaaagactgcttcctcccaggagacagcagctcatttgcacacagacacccacagccctcaaagcctggaaggccaagctgttaggacccctgagagcagggtggctcctgggaggagagcccaggccaccaccttgccctccctggcccctggccttcgatggggctgctctgatcacaaacgtccaccaacgtagccggcccagaagtgcacccatgtcctctggtatccactggctctccaagccaaactgggcagggaggagttgtgagggaaaactgcaggtcaggagggaggctggcaaagcgggccagggccaggcctgaccccagctctcctctcccggccccactgccggccagtgtttaacaaggccctgccttctccctctagtgctagggacagccaccttcttcctctccccaccgccccctctcccctgcaacacgtcatctgacaagtcagtgcgatctcactggaggtgcatctcacaggaacgcggggtcacagcctcctgcacacactccatgctgcacagcaaggtgcacgtgtccctcagagccccagacaccatcccccactcacccagaagcccaagtgattcccaacagcccccagcagcctaatgggttggggtcttgggagcagctgtccctggctccttccctgatcccaccgcccagcctcaccccacggttcctccattgccccacctcccactgcgccgccgggcctctgccagggtcaaggggcttcccccctctggcagcagacgccatggtgccgaggtggcctccacaaccgccctgtgcgccaataggacaagactgtcctccctcccccacacttgtcactttgagggacacgtggatgagacaggaaaacacaggggagtgtggagacctgaggtgacttggagcaagcctctcaacctgagcggcaatttcttcatctgtaaaatgagggggttgttctcatctctgaggctttgtgtcgctctcaaagcctgctagcctcgggttctaggactctgttgggatcgtgtgtgatgttttctgctgagcgactggcagcctgtgtcctcggggggaaagagggcaggcgctccaaagctcctgcgctctgtggctccccctccctcgcagccccaagccccaggtgtgccggccgccctgagcccctccagcacctcccggaggcgcctgcaagacacctaaggtccccgcctccctcctctcccccccgccacacccctacccccggcaggcgacgtccccgcccctcgaccatggcctggtgaagaagccggccaggcccgatcagccccatccccgccgcacgagcggcgcctgcggacagctcctggggccccggccttgtcactccggaggcgggaggctccggggggtcgggctgggaagatcgagccggaggccgctaggctcccaggccccggccgaggctgcgcggccgcacggtgggcaggctcgggtgttccggcaaactgccgggtccccatcttcaaaagagaggaggccctttctccagcttcctctgcgggagcccgacccagccccatcccgccacccccgggctgcacctcggcccctccccggcccgcgcccctgcccggggcgggccaggaacctcggcccgcgccgctggggactytggagcggaggaggaagcgcggcggggcgggggcgggggtgtgtcgggttttataacccgcagggcggccgcggcgcaggagaaggggcagagccgagcaccgcgcaccgsgtcatgggggccgcctcgggccgccgggggccggggctgctgctgccsctgccgctgctgttgctgctgccgccgcagcccgccctggcgttggaccccgggctgcagcccggcaacttttctgctgacgaggccggggcgcagctcttcgcgcagagctacaactccagcgccgaacaggtgctgttccagagcgtggccgccagctgggcgcacgacaccaacatcaccgcggagaatgcaaggccaggtggcgcccgggcccgggcgggggcggggcgggccgcggcggccaatcacagcacgcggccggcttgtggggcgggcaggctggcgcccccgacccgaaccccaccccgaccccggaccctcgccccgacagtcagccgcggggcccgagcgccgggctgcgcgcacggcctacgctcccagcatgcacgagttggatggatgagggtggctgctcccaggccgcgcccgccttcgccgaaggtgctgggcttggctctggggcccccgcgctctcgggcagctgccttctcacctccggacgctgtcgctgtcaccgtcaccgcactgcactgtccatccaccctccactcgcccggcctcttttctggtcccaatttctgctccaccattcccatgaggcagattccctccagaaggaggaagcgcggcttccgcaaactaaggtctcccgcagggatctccccagggcccgggctctggaagcccttggccttcctcccctcccccagcaccgtggcttctcctttatggcctgcatctaagcagggtcctacaccctccctgccctcctggtgcccaataggaggaagcagccctgctcagccaggagtttgcggaggcctggggccagaaggccaaggagctgtatgaaccgatctggcagaacttcacggacccgcagctgcgcaggatcatcggagctgtgcgcaccctgggctctgccaacctgcccctggctaagcgkcagcaggtgggctgagggctgaggcagagctcgggggcggcctcctagtgccccatcgtgggggtcgggggagagcagcccatcagggagggaggaaccctgggatccacatgggccctgacagaagggaaagcccaggtaagcacagaatggctttctgagcattgatttttcttggagatggggtggggagttactttctgttaaaggaagcattctggagtag

SEQ ID NO: 93984 - DNA, 44637 bp, Homo sapiens
cctggccaacatggtgaaaacccgtctctactaaaaatataaaaattagctgggcatggtggcacatgactgtagccccagctactcgggaggctgaggcaggagaatcacttgaacccaggaggcggagattgcagtgagccgagatcacaccactgcactccagcctggcaacagagtgagactgtctcaaaacaaacaaacaaaaattttaaataaagaaaaagaagaaaacatctgaacagattcataactagtaaggagattaaatcagtaatcagaaaactcccaacaaagaaaagccaaggaacagatacttcacaggagaattctagcaaacatttgaattaattgaaaagttaataccaatccttctcaaattattccaaaaaattaaagagaaggtaacacttggctgggcacagtggctcatatctgtaatcccagcactttgggaggctgaggtgggaagatcacttaagcccaggagtttgagaccagcctggacaacatagtgagaccccatctcattagaaaagaaaaaaaaaagaagaaagagagaaggtaacacttttttttttttttgagatggagtttcactcttgttgcccaggctggagtgtaatagtgcaatcagctcactgcaacctccacctcccatgtacaagcgattctcctgcctcagcctcctgagtagctggggttacaggagcacaccaccacacctggctaaatttttgtatttttagtagagatagggtttcaccatgttggccaggctggtctcgaactctagacttcaggtgatctacccgccttggcctcccaaaatgctgcgtgggattacaggcatgagccactgcacctggccaaggtaactcttttaaactcttttttttttttgagacagagtttcccctctgtcacccaggccacagtgtgatggtggaatctcagctcactgcaacctctgcctcccaggctcaagcagttctcatgtctcagcctcctgagtagctgggattataggcatgcaccaccaggcccagctaatttttgtatttttagtatagacacagtttcgtcacattggccaggctggttttaaactcctggactcaagtgatctgcccgcctcagcctcctaaagtgttagaattagaggtgtgagccaccacgcccagcctaaactcattttatgaggccagcaataccctgataccaaaaccacaacagatactacaagaaaactatagatatccttgatggatattcatgtaaaaatcctgaacaaaaatactcacaaactgaattcaacagcacattaaaaggattatacagccgggtatggtagctcactcctgtaatcccagcactttgggaggctgagacgggtggatcacctgaggtcaggagttcaagaccagcctggccaacatggcaaaaccctgtctctactaaaaatacaaaaattagccaatcatagtggcaagcgcctgtaatcccagctacctgggaggctgaggcaggagaatcgcttgaatccaggaggcggaggttgcaataagctgagatcgcaccactacactccagcctgggcaacagagtgagactctgtctcaaaaaaaaaaaaaaaaatggattatacaccatggccaagtgggacttgacttattcctggaatgcaaggatggttcaacatacaaatatcaatcagtgtaatggactacaaatggtttgcaactgatcatgacctgacttacaatttttttgttttatgatgggtttattggtgtttacaatgcattttttttgtggtgttttgttttgttttgtttttgagacagggtcttactctgtcacccaggctggaatgcagtggcatgaccttggctcactgaaacctttgctccccaggttcaagcaattctccagcctcagcttcacaggtgcatgctaccatgcccagccatttttttttttttaattttttgtagagatggggtttcactatgttgcccaggctggtcttgaacttctaagctcaaagcgatctgcctgactcagcctcccaaagtgctgggattacaggtgtgagccaccccacacctggcctcggtacattttttatttagatattttttatttacaatgggcatgtcagaatgtaatgccattttaagttgagaggcacattaacagaatgaagaacagaaaccatattatcatctcaattgatatagaaaaagcacttggcaaaaacactcaacaaactacgaatgaaaggaaattatctcaacctaataaaggccatgtttgaaaagcccacagctaacatcatattcaatagtgaaaaactgaaagcttttcttctaagatcaggaacaaggcaagtacgtacattcttgctacttctattcaacatattactaaaagcccttgccagagcacttaggcaaaaaataaataaataaaagctgaaaattggaaaagaagggccaggcacggtggctcatcctgtaatcccaacactttgggaggctgagacgggaagattgcttgcttgaggccagaatttcaagattagtctgggcaacacagcaagaccctatctctacaaaaaactttttaaaaattagccaggcatgatgttgcatgcttgtagtcccagctgtgcatgaggctaaggcagggggatcacttgagccccagctttggtgataagggtgaaaccttgccttaaaaaaaaaaaaggaaaagaagtaaaattatcttcattaacaaatgatgtggtattatatgtggaaaaccctaaggattccaccaaaaaatggttagaactaataaataaattcaacaaagttgcaaggtacaaaatcaacacacaaaaatcagttgccttctaaacactaacaatgaacaactcaaaaaggaaattaagaaaacaatcacatttaaaatagcatcaaaaagaataaaatatttaggaataacttaatcaagtaggcaaaagacttatayactgaaaactacaaaacagtgctgaaagaaattagatgcaaataaatggaaagacattcgtgtttgtggattggaagacttaatattgttaaaatcccatactacccaaagtaagctacagattcattgcaatacctatcaaaatcccagggccatttttctttgcagatttttaaaaagtcctaaaattcatacggaatctcaaaagaccctgaatagacaaaataatcttcagaaaaataaagcyggaggccttccacttcctgacttcaaacattgtacaaagatgcagtaatcaaaacagagtggtactggcataagaacagacatatagaccaacggagtagaatagagaacccacttcctgacttcaaaacattgtgcaaagatgcagtaatcaaaacagagtggtattggcataagaacagacatatagaccaacggaacagaatagagaacctagagttaaactctcaagtatctggtcaagtgatctttgacaagggtaccaaagctacatagtggggagagaatagtgttgggaaaaccggatatccgcaagcaaaagaatgacgttcaacctttaccctacaccatataccaaaattaactcaaaatggactaaagacctaaatgtaagacctgaaactataaaactcctagaagacaacgggggaagcttcatgacattggatttagcagtgatttctcagatatgataccaaaagcacagacaaagtaaaaatagacaattggggctacatcaaacataaacttctgcatagcaaaggacacaatcaacggaatgaaaagatgacctagggaacgggagaaaatatccacgatacataaagaatgcctacaactcaacaacaacaacaaaaaacccgattcaaaaatgggcaaaggacttgaataaacatttctccaaagaagatatacaaatggccaacaagcatatgaaaacatggttaacatcagtaatcaggtaaatgcaaatcaaaaccacaatgaggtatcacctcatcatccattaggatgcccactgtaaaaaacaaatgaacacaggttgggcgtggtggttcacgcctgtaatcccagcactttgggaggccaaggcgggtggatcacctgaggtcaggagttcaagaccagcttggccaacatggtgaaacctcgtctctactaaaaatacaaaaattagccgggggtggtggtgggcgcctgtaatcccagctactcgggaagctgaggcaggagaatcgcttgaacttgggaaggggaggttgcagtgagccgagatcgcaccgctgcacgccagcctgggcaacagagttagactccgtctcagaacaaacaaacaaacatacaaacaaacacagaaaatatgtagtgttggtgaggaggtggagaaattggaacctttgtgcattgttgttagtaatgtaaaatggtgatgctgccatggaaaacagtatggggattcctataaaaataaaaaataaaatttccatatgatctagcaatccacttctgggtatatatccaaaagaactgaaaacaggatcttagagatatctgcacacccgtgttcactgcagcattattcacaatagccaagaggcggaatcagcagaaatgtttatggacaggtaactgggtggcatatacatacagtggaatattattcaacatttataaaaagaagaaaatcctgtcatatactacactatggatgagccttgtggatatcatgctaagtgaaataagccaggtcctaaaagacaaacacctcatgattctacttatatgaagtatctaaagtagttaaactcttagaaacagaagtagaatggtggttggcaggggatggagaaagaggaaaaagttgttccatggatataaagtttctgttttgcaagaagaataagttctagagatctgttgcgcaacaatgtgcatgtggttaacactactgtacacttaaaaatggttaaaatggtaaattttatattttgtgtttttaaccaccactaccaaaaaaaaaaaaaaaaagctagggaactaaattgttattttgaaaacacacataagggaaagaatcggctgggtgtggtggcttacacctgtaatcccagcattttgagaggctgaggcaggaggatcacttgaggccagagttcaaaaccaacctgggcaacataacaagatgcccatctctaaaaaaaaaaaaattagccaggggtggtggcacttacttaaatgggaggactgcttgagcacaggagtttgaggctgcagtgagctatgatcacaccactgtatttcagcctgggtgacagagagcctgtctctaaaattaaaaaacaaaaaaaaagtaagagaatcaagcacccatactgcctttcctacattaattgtatctcaggagccaaatagttgaagggaggtttctctttgtagaagaattgtggttaacaaatgaagtaatattgaaattttttaggctcaagcgatgctcccatctaagcctcagcctaccgagtagctgggactacgggcacgcgccaccacatccagctaatttttaattttttttttttttttgtagagacagaattctcgctgtgttggcgaggctggtctcgaactcctgggctcaaacgatcctccctacccggcctcccaaagtgctgggattacaacagtgagccaccgcgcccaccagagccaattatttttagatgaggaaactgaaattcccaaaggrggaatccccgtgtgagaaagcctcgtgtaggtgagctttccagcatatgcccgccttctagatttaacctctgaaaactaaattttaaggtacctttgcttccaggggaaaccaattctgcctacttgggaagccagaacatgaccgcgtaggcaagacctagctctgcgcacgcgcagagccaccacgtctggcgttcgcgtgrgaaccttctgggcgtgggcttcctgcggctgagtggcagcttccatccggtgggttttgctcggcgcacccgggaggcggggccagcgaggcaagatggagttagtgcaggtcctgaaacgcgggctgcagcagatcaccggccacggcggtctccgaggctatctacgggtttttttcaggtaggcggccagagccatgctcttggcctctggggctggactttcgctggctgatttcttggaagrggtcccaggctcgggtcaccttggagaatmcacagctcttgtcaaggacaaccgccccaatctctgccttgccacccccaggctggtctctgtcccatatatccccgatacaagaccgaagctatctgtagagtcagagctgtgactcggaggcaagggcatctgggctcccctcttttcccacgccctggagagtaatgaggattacaagacattaactcagtgaccctggtaaagtttttttccctgcactgccgtacagttccttgtctgtaaggcgttgaaggtaataatgatggtcccttctcttcctgacattcactgatcccacgagcagcatagtttcgcagaaacctaaatggagacccagagtggaatgaaagagcctggagaccttcktatcattgtaagaagatgaaatactttggctttttgatttcctaaaggttttgctaattccagtgcctcctggctgagggatagtagatacaagtagtcctgtaatctgaaragactacatttatatttttagtgtaatttgagcacatcagttgtcaattcatcttttcccatccccagcacttcttcattttgctagttgatgcagcagcccttgtgtctgaaagttgttactcwcactttatttccgtttatgttttgaactaagaatcattctaaaatgtctgttttcttttgggtattcacaggacaaatgatgcgaaggttggtacattagtgggggaagacaaatatggaaacaaatactatgaagacaacaagcaattttttggtgagtgcagtattttttagtatgaataattggattgggattgggatttgatttgagtctattttccatattatgcaatgagcttttacaaaacacctggaaaaggatgaaaaactcaatagaaaatgaaaaaagataatttacagaaaaaagaaaagtaaacagccaatgaaggtatggaaaaatgctcattctcacttgtaacaacagaaatgcaactttaaaaacagtgttatatatttttcacctatcaaattttgaagtgtttttcttctttttttttttttttttttttttttttgagatggagtctctgtcggccaggctggagtgcagtagcgcgatctcggctcactgcaacctccacctcctgggttccagcgattctcctgcctcagcctgcctgagtagttgggaccacaggcgggcgccaccatggccggctaatttttgtattttttagtagagatggggtttcaccatattggccaggctggtcttgaactcctgacctcgtgatccacccgccttggccccccaaagtgctgggattacaggcgtgagccactgcgtccagccttgagtatttttcaagctgataaatcccaatgtgggcaaaaccatataaatatgtaggttaatgcagtctttttggagggataatttggtaacatttgtaaaaatttacattgcacatatcctttgtctcagcacttccacttttaacaattaattcggctgggcgcggtggctcacgcctgtaatcccagcactttgggaggcggaggcgggcggatcacgaggtcaggagatcgagagcatcctgcccaacgtggtgaaacccagtcgctactaaaaatacaaaaattagctggatgtggtggcgtgtgcctgtaatcccagctacctgagaggctgaagcaggagaatcgcttgaaccagggagtcggaagttgcagtgagcccagatcccgccactctactccagtctggcaacagagcgagactcttatctcaaaaaagaattaattctacaaatattcttgcaaaccaacatacatcacagcattgttttattatattttaaaaatttatttatttatttaatgttgagacagggtctcgctctgtcacccagtctagagtgcagtgactcgatcatggctcactacagcctcaactttctgggctcaagctgtcmtcctacctcagccacccaagtagctgggattacaggcatgtgtcaccatgcctggctaattgtttaaaaaaatttttttttggagagacgaggtcttgctatgtttcttaggctggtcttgaattcctgggctcaggtgatcctcccacctcagcctcccaaagtgctggaattacagatgtgagtcactgtgcctggccacagcatttttgtttgtttttgttgttgttattttgagacagggtctcactgtcgcctaggctggaggcagtggtgtgatcttgactccctgcagccgtgacctcctgggttctagccttcctcctgcctcagcctcctatgtagctgggaccacagtcatgcaccaccacacctggttaattttttaatttttttaaagagatggggtctcactttgttccccaggctggtcttgaactcctgggcttaagccatcctcttgtctcagcctcccaaagtgctgggatcacgggcatgagccaccgtgctagtaaattttaaaagcaacattagtgtgcgtaagttggatactgatgaattaaacattttttagaatagtttgttgttgtttttttattttaagttctagggtacatgtgcacaacgtgcaggtttgttacatatgtatacgtgttttggaatacrttgttgttaagaatgatataaacctataaatttaatatagagagatgtcaaagatgtgtgtaatataaaaaaattccagtagcagaacaatgtttggtatccttaaaaggagaaaatacatgctttttgtgtgcatgttaaattttggaaggaaactcaataaactcatagaatcagatgatagagattcaacattctgcccctccactttataactttgtgacctggttaacttaattaacttccctaaccctcagttttctcatctgtaaagtagaataataataatatgtgcctcctaaagctgtattaaaagatgaaaagtgaatgggaggaacttactgtgattagggtttctcagcctcagcagtgttaacactatggggcagataaktctattcattttttgtttttttatttcaatagtttttggagtacaggtggtttttggttacatggataagttttttagtggtgagttctgagattttggtatatctgtcacccgagcagtgttacactgtatccagtatgtagtcttttatccccttgagtccccaaagtcctttatatcattcttataccttggcatcctcatagcttagttcccacttgtargtgagaacatacgatatttggtttatcattyctgagttacttcacttagaataayggcctccagctccatccaagttgctgcaaaggccattattgytttctgttttacggctgagtagtattccatggtgtatatataccacattttctttatccactcgttcactgatgggcatttaggttggttccttatttttgcaattacaaattgtgctgctataaacatgtgtatgcatgtgtctttttcatgtaatgacttctttttctttgggtacatacccagtrgtgggattgctggatcgaatggtagttctgccttcagttctttaaggaatctccttactgttttccatagttgttgtactagttcacattcccaacagcagtgtaaaagtgttgtgttttcaccacatccacactaccatctattattttttgaatttttaattatggccattcttgcaggagtaaggtgctatctcattgtggttttaatttgcattttcctgataatcagtgatgttgagcatttttttcataggtttgttgactgtttgtatatcttcttttgagaattgtctgttcatgtcctttgcccacgttttgatgggattgtttttttcttactgatttgtgtgagttccttgtagtttctggatattagtcctttgtctaatgcatagtttgcaaatattttctcccactttgtgggttgtctgtttactctgctgattatttcttttgctgaacagaagctttttagtttaattaggtaccatttatttatttttgtttttgttacatttgggttcttagttatgacttcttgcctaagccaatgtctggaagagattttctgatgtgatgttctagaatttttatgttttcaggtcttagatttaactctttgatccatcttgagttgatttttgtataaggcaagagatgaagatccacttccattcttctacatgtggcttgctagtttttccaacaccatttgttgaatagggtgtcctttccccactttatgtttttgtttgctttgttgaagatcagttggctgtgagtatttggctttatttctgggctctctgttctgttccattggtctacctagctacttttataccggtagcatagtgttttggtaactgtagcctcgtagtataatttgaagttgggtaatgtgawgtctctagatttgttctttttgcttagtattgctttggctgtgtgggctcatttttggttccatatgaattttagaattgttttttctagttctgtgaagaatgatgatggtattttgatggaaattacattgaatctgtagattgctttgggccatatagtcgttttcacaataytgattatgygcatccatgagcatgggatatgtttccatttgtttgtgtcatctatgatttctttcagcagtgttttttagttttccttgtagagatctttcacttccatggttaagtatattcctaagtattttattttattttttgcagctggtgtaaaagggatggagttcttgatttgattctcagcatggtcattgttggtgtatagctgtgctactgatttgtatacattgatttagtatcctgaaactttgctggatttatttatcaggtctaggagctttttggatggtctttaagtttttctagatatataatcctatcatcaacaaacagcgacagtttgacttcctctttttaaatttggatgcactttatttctttcctttatccaattgctctggctacgacttccagtactgtgttgaatagaagtggtgaatgtgggcatccttgtctcgttccagttctcagggagaatgctttcagcctttccccattcagtatgatgtttgctgtgggtttgtcatatatggctttttttactttgaggtatgttccttctgtgccaattttgttgagggtttttatcatacaggaatgttggattttatcgaatgctttttctgcatctggtgagatgatcatatgatttttatttttaattctatttatgtgatatatcacattgacttgggtatgttaaaccatccctgcatccctagtattcaacccacttgatcatgatatattattatcttttgatatgctgttggattcggttagctaatattttgttgaggatttttgcatctgtgttcatcagggatattggtttgtagttttctttttttgagacagctaattctttgttgtgaggggctgtcctgtgcatcatagaatgaccagcagcagcagcactgactgacaaaccaaaaatgtctccagacattgccaaatgtccccttggggrcaaaatttccatctgttaagaaccattggcctaatgcttggcacataataagtgctcaataaatattagcactgtgactgctrttattatttttacagtttkagtatcccttacccaaaatgcttgggaccacaagtatttcagattttaggtttttttggattttggaatatttgcattatacgtcccagtttagcatctctaatctgaaatctgaaatgctctaatgarcatttcttttgagtgtcataacagcacacaaaaaaagtttccaattttggagcttttggaattggaratacccaacctgtaccttcttgaattgttgaattttctcccatgtgcatttgttacttttataataataaaaaaatactctcttgattgagatgaaaagtatcaaagaggaaaaagcaattagtcttcatccaggggaacaatgtataacgtgaaaaaataattgcctggcatttattgagtgattaccatgtgctaggtgctgtgctaaacaaaaacatacgttatctaccttaatcttcaacatctccttgagataagcacttctgtgctcctccgcccccatttyacagatgaagaaggtaagtcattgaatagttaggaatatttctcaggaatgtggttgctttggatgcatgttggtctataagaagtaaacatcttatgtactctatgtgtgtgcgtgtgtgtgcgtgtgtgtgtgtatgtgtgagtgtgatgaggtctcactattttacctgggctggtcttgaactcctgagctcaagcaatcctcccgccttagcctcctgaggagctggaattacaggcacatactgtcacacctagttatgatatttttaatacataaatcacagaattttagacctagaatagattttaagagattgtctaaaaactattgttttatagatgaagaaactgaggcccaaggaagtatctttaccaaagagacttaatcatgtaattaatggcagaacctggggtaattattctttctacttctcactgtattgttacaaactataatattacattctttcctttctttaattttttttttttttttgagacagagttttgctcttgttgcccaggctggagtgccatggcacgatcttggctcgctgcaacctccacctcccaggttcaagtgattctcctgcctcagcctcctgagtagctgggattacaggcatgcgccatcatgcccagctaattttttgtatttttagtagagatggggtttctctatgttggtcaggctggtcttgaactcctgacctcgtgatccacccgcctcagcctcccaaagtgctgggattacaggtgtgagccactgcagccagcctcctttcttctgttctcccttgcattggaaatattcttatttttgctaattaaaaaaaaattagggcctggcatggtggctcatgcctgtaatcccaatgctttgggaggctaaggtgggaggatcagttgaggccagcagttcaagaccagcctgggcaacatagagacccccatctcgtgtgtgtgtgtgtgtgtgtgtgtgtgtgtgtgtacctatatatgtatgtatttatatatatttggtgtatgaaagctccctccccttataattttgcaactctttcaatagtttagtctttatgtatatttaaaattcttttcttttatttcgagacagggtctctctgttgccccacctgaaatgcagtggtgtgatctcggctcactgcaacctctgcctcccgtgctcaagtgatcctctcacctcagccttgagagtagctgggactacaggcatgtgccaccatgcccagctaatttttgtattttttgtagggacaaggtttcactatgttgcccaggatggtctcgaactcctgagctcaagtgatccccctgcctcagccttccagagtcctgggattaagaagtgagccaccgtgcccaggccaggtgtggtttattaaaaaaaaaaaatgcacagcatttttaaaaatagcaacacaacattccagtgtatggaagaaccattatttcttcaatcctgttactatcgatagacacatagattgcttttgactttttgctattaggaatgatgctactgtaaacctgcttgtaactacattcatgtgtttaaataaatttctggcctgatctctactaaaaatacaaaaattagccaggcatggtggcacatgcctatggtcccagctactcgggaggctgaggcaggagaatcgcttgaacccaggaaggggaggttgcaggcagtgagccgaggccgcgccattgcactccagcctaggcgacagagcgagactccgtctccaataaataaataaataaataaataaagttgaatttctgagtctgagaataggcatttaacatttcaagaaatacagagagagagacagacagagagagagagagattgttagggcccacttccatcattatagcctaactgtattgtcagggcttgacttatgaaacctttcccaaggtctcctccatctgcctgcacattcccctgcctcactggattatagtttacttttagttagctattcttaagatttatttctctaaatgaarcagtaaatgttgattgaaatctgtatttttaaaaagagatgaggtcatgtttaagtaccgttagtcaatttttgttgattatatgtttacctgggaaaaccctgtaaatgaaatgcagattaccttttacttattggtttaaagtccatcataggaatgaatggattcagtgttccctattggcaggtaagagcagtaaggaaggggtagraggaattaatacttattatgtgcttatatggctgatgctgaactaggtgaatgtatgtgatgtttaattttcacagcaactctaagatgtaggtatagtcatccacttttactagataaagaaactgaggctcataaaatttgcctaataaccactgataataagtgacaaagcccaagtctttgctcagtttaaggacccaattgtgtaaataagtagtggttaggcccctcaactagtgcacagaaatttcctaaatgaggagtgcagccatattattttgatgacatgagctgtcctatgtacctaaccatcatttctaatgtttgcttattgtatataattcacaaatttccaaaaggatctagggtggttttaaaaaaatacttatgtggagacatagaattcaagtatgattgctacaaatgtgttttttccccagtctcaagaggaacaccttcttttctgaataccctgtacatctgggaacacactttcctatcctgtctgctactccctctgtggggagctggcagggaagcaaggattctcccctgtgggaaaggcctgagccccacccacagcagtgaatcatctcagtccttgctgcgggttgctgcttaaagtttgccacacacctcctggagcttaccttcacgaattcacccagggtgttattcctccaatagctctcttatataagatcacaaaaagtcttttcttaataaaaaggttgtcttctttgatattatgcatctatgctttaaaaaaaaaagtttttctttttaaatgttcatcttcccacccaggccgtcaccgatgggttgtatatactactgaaatgaatggcaaaaacacattctgggatgtggatggaagcatggtgcctcctgaatggtaagctaagacaacattttatttgtctttcttttttttcttttttgagacagggtctcactctgtcacccaggctggagtgcagtgacatgatcatgactcatgtcagctttgacctcccaggctcaagtgatcctcccacatcagcctccctagtagctgggactacaggcccatgccatctcacccggataatttttgttttgtttttaaatttgtttgtttgtttcttttttgagacagagtctcattctgtcgcccaggctggagtgcagtggtacaaacttggctcactgcaacctccacctcctaggttcaagcgattctcctgtcttagcctcccgagtagctgggactacaggtgtgagccaccacgcctggctaattttgtatttttagtacagacaggttttcactgtgttggccaggctggtctcgaactcctgacctcaggtgatccatccacctcggcctcccaaagtgctgggattacaggcatgagccaccgtgcctggctttttttttttttttttttttttttttttgagacagagtctcactctgttgcccaagctagagtgcagtggcatgatcttggctcactgcaacctctgactgccaggttcaagcagttctcctgcctcagcctcccgagtagctgggactacaggctcatgctaccacgcctggctaatttttgtattgttagtagagatggggtttcaccgttttggccaggctggtcttgaactcctgacctcaggtgatccacccgcctcggcctctcaaagtgctgggattacaggcatgagccactgcactcggcctaatttttgtattttttatagaaatgcgatttcgccatgttgcccaggctggcctcaaactcctaggctcaagtgatccacccacctcggcctctcaaagtgctgggattataggcatgagccaccatgcccagcttttatttatttttttagttgaaatgggatcttgctatgttgcccaggctggaactcctgggctcaagcaatcctctcacctcacccttccaagtagctgagattataagcacgagccaccatgcctggttcattttattttatttaacttggcaatatttatttcattacaaaaatatttattgaatatctctctataaagcagtcagtggtgttcttctgaaagtatctgtcctatttacattgagtgcataataagttacccttaaatttagtggcttaaaacaacaactgtttctctctccatagtttttttttgggtcaggagttcagacaagataaaacgagggtggctagtctctgctcctagatgtctgatgtctggagcctcagctggaagactccaagtctggacactggaatcatctgaaaacttgttcacttagtatctggcatttattgctggctgtcagctgggggtatagttgggcctgtgggttggaacaccttcctgttgcctgggctgacacaggcaagtgctctgagagagtgagctaggcaggaaccatattgccttatctaacttagtcttgcaaattgtccagtgtcactttcatattccattgattgaggcaattagaaagctccacccaagttctacatgagaaaacatgaacctatctcttgatggaggcatgtcaacatcacagtatatattgggatgtgtaatggtgtggctgtcttggaaaaacaatatgccatagtatcacctgtctgggtgaagcgaaaggtgaaaagaactttggctgtaatcttatctggcagtttgactttaagcaagttccttaacctctctgggggttagtctcattgtctataaaatgagagccctaaaattccttaggtctctaaaatttgtatgactttataatacgcatattttgaaatgaaattctaaatgctcacttgaattaccaaattttgcatgacgtatttcaaagcaaagtacttayatctgtttcatagattgctgaaataataccatacagttgatatacaattaaactctggagctcctttccagtggtctagaaaatttcacccaaaaactagaaataagtatatctggtgggctgtgacattttattttaattgaatttgatcatcagagctagttttgggctgtcttcagtagaaagtgggataatctcagtgtatttgcctctgttctaaagagtcacttggaaacccagatatgtgacataagtgagtgaagtgcagctatgaaacaataggacgtagtggagactgcagtgaactgaaaagtacagacttgtcaaagagggcagcaggcttattcagcaacctgcagttccatcaggtgagaattctgcgaagggtttctggatgatttttcaaaggtggacatctgtatttatttgtgagacttcttgttttttcttgcttttttttttttttttgagatagcgtctcactctgtcgcccaggctggagtgcagtggcaccatcttggctcactgcaacttccgcctcccaggttcaagcaattctcccgcctcagcctctcaagtagctgggactacaggtgcctgccaccgtacctggctaatttttgtacttttactacagacaggtttcaccatgttggccaggttggtcttgaactcctggccccgagtgatccacccactttggcctcgcaaagtgtagggattacaggcatgagccactgcaccgggtcagttcttttttttttcaattaatttttaaaaatatttgacattttaaatacagcattatctagcagaacttttcacaatgacggaagtgttctttatctgccctgtccaatagggtaaccacttgccacgtgtggcccagaacattttattattattaatattattattattttgagacggggacactctgttgcccaggctggagagcaatggcacaatcagtctcgacttcctgggctcaagtgatcctcctgcctcagccccctgagtagctgggactacaggcatgtggcaccatgcccagctaatttttttgtatttttagtacagatgaggtttcgccatgttgcccaggctggtctcaaactcctggactcaaatgattcgccaacctctgcctcccaaaatactgggattagaggcatgagccaccacacctggcctttctagagcactttaaaatgtggataatgcaactgaggacattttaaaatttttatttaagataagtaggctactcgattggacagaatagtttgtttgtttttcaaatactgtgagctaagcaaaacatatttgtactgtacatttttgctgagctataaccagatttcaacccctgttctactacttggactaattgtgagcactgactgtgtcagtgatgtaatttgaagaatatgataatggataatatctttaaaagctcactggggcttggtgtggtggctcatacctgtagtcccagcactttggaaggctgaggcatgaggctcgcttgaggccagaagtttgagaccagcctgggcaacataacaaggcctcatctctataaataaaaaaagttttagaaaattagccaggcatggttgtacatgcctgtagttccagctacttgggaggctgaggtgggaggatcccttcagcccaggggtttgaggttgcaaggaggtatgattgcaccactgtactccagcgtgggtgacagagtgaaaccctgtctctgaataaaaaaagytctttggttcttaccgtgagaaagcagcactgattaggagctttctcatgctacatcatttggggattgctgttgcactctttttagtgggaaataacaacctgtggttccgttaaggtctgaggagctgtggggtttttttgtttttttttttccacattctaygtctctttatttttttccttcaacttttattctaagctccagggtacatgtgcaggatgtgcaggttgacataggtaaacatgtgccatgatggtttgctgcacagatcatcctatcacctaggtattaagcccagcatgcattgagctttggttttaggtttagaaccatcaaccttctccaaaggggcattctatatgttaggaggactatttgagaccaaggtgtcaacatggaattcaggctttargagctgaggtgtcctggtttttgtttaactgagagattgtttcttgggtggaattggtcctgggaggctatrgaaggcatgtgagctgtcttattcagattgacatctacctgcttcaaaatgttcatctaacattggtgctcaggggccacattttgggagatgaggggtaggggtgtgatttcaattatgtgcgattaattatgtttaaaattataaaatagtaaaaacctgaaaagctaaaagttctattcagtggagcaagtccttttatttgatctgagaccacatgaaaatgaagctaagagctgtagaagatcactccagcaggtgcctaagggcaagtgaggattcaaagctgcatttctttgtggagaggagcctcctaaggtctgagtacctttgatgacccttatttgtatgggaagcttcacggcttgtgatgaatctttttagggagaaatggtgttgaacaagcttagctgtttgtttctcaaacccctctttgttgaccgtgacacactgtggaattctaaatctgtggattcttacctttgattcatgaataaatttgatgttgggttgatatatctctaattagagagctaggtattatcacgtgtagagagtaattgtacagatacaatttatcatccctattcaaataactatttagtacctaccaggtgccaagaacctggggtaaagcagtgaataaaacaaggtccttgttttcataggggaaggcagaaaaacatcctttatataattgtggtaatgaaaaatgcaaggaagataatatgaagctgggcctcatgggaatcaagagcaatggaagggtcaggtggctgttttatacagcagttagagaaagcttctttgagaaagtgrcatttgaggaaagacgtagaagcggggagaaagcgttccaggcagagggaaccacaggtgcaaagcctgtatgtttgagatgtattgcttggtctgttcaaagaacagcagtatggccagtttggctggaatggaatgagtgaggggaagatgttaagaaacgaggtaggagaaatagctagggcccaaatcatgtagatgttgtaagatgaaaggttcttgtatcggctcgaaccctgagagtgcatcagcagacarcatggcagtgtggagcaacacactgttttaatgagcrcctgggtgcaggtgggctgatgcctaaaatggcgttagcaccaaatgaggatggggcaggggttttatagtctcctgtaaacaggaagtgtctcagtctgatgtaactgctacgtagtacctggacggcctgcccctcaatcttcaagggggtatgtgtctttyggccagctctcttcctgcttctgctgtcttgctgacccacrctgctggcccaagcttgggactgggcctgagaagggaggagttattcatctcttcaagctttcaggcctcagggagaatctttcagtaagccatggtacatacttcggctttttgtctgaatttatttggaagtcactggaaggtaagatagggtgtgatctgatttacagttttttaacatttggaataatcccgaactttcagaatcattactaatattttaataaaagtaagttgccaaattgatgccccatcactcctgaatactttagtgtgtacgtcttgcaaacaagaacattgtcctacataaccacaatatgaccataaatatcaggaaagtaacaaagatacactatgaaagggaggcaaaattttacccttatcctcttagggctttttggttgggcttgagaattaaagacatgttaacaggagaaaagcatacaaatttatttaatataagagttccgtgatgtggagccctcataagggatgaagacccaaagatgcagttcatgttgaacacttagatactgaattggacaaggagtagaacactgaaaatgagaagacaaagggacttgggcttgagtaggttaattgggtggagaagtgactaagaagataaaagttaatttaacaacgtttgtgcagatttcccttgacctcaatttcctgtccttgatgtagaaygatagtttccttctggtatagggaggatatctttgatgtgggaattttttctcctrctttcagaaagaaaaaggccatattattcttgtgcctgctgtttttctttaccttttttttttttttttttttttttgagacaatgtcctgcyctgtcacccaggctggagtgcagtggtacagtctgcagcctcgacctcctgggctcaaatgatcctcctatctcagcctcccaagtaggtgggattacaggcatgtgccactacacctggcgaatttttgtattttaagtagagacggggtttcatcatgttggccaggctggtcttgaactcctggcctcaagtgatctgcctaccttggcctcccaaagtgctgagattacaggcatgagccaccacacccagccgtgcctgctgttgttcaagtgcctttaactcagcatagtccatatgccagagctgcatattttggagcagcgtgttctgaacttcagccactcaggtttcgtcagttgtcccaacagtgtcctttatagagagatccaatcacacatttcatatggatctcaagttctttagtctccttcacacttgattggttcctcaacttttcygtgattttcatgaccttgacgcttttgaaaattacttgacagttatattgttgaaggtccctcagtgagtttgttgaatgtttcctcatgactaggttcaggctatgcttctgtgacattcctgtcactgaagccatgtttttcttgttgcactctattaagtagcagctgatttgtttttgtcctattattaatgaaaacctctatcacgtgattaaggggtctgccggttttctccattctaaagttactaattttccctttgaaattaattagcattttgtggggagacactttgaggttatgtaagtatccccttactcatcaaagctttaattcattatttgtatctgtatcaactcctattttaatcaatgggttataatccattgctttaaatggttcttttattgttcaaattgggctcaatttgactagttggaacccattcaagctgcatttggagttctttggaggtttttagaggggaggggttctcagtttttaaaaatattttatttgagatagggtctcactctgtcgcccaggctgagtgcactggtgctttcacagctcactccagcctcaacctcctgggcttaagccatcctcctgcctcagcctcccaagtagctgggactacaggggtgcatcaccacaacctgctggtttttttttaggagataggggtctcacagtgttgcccaggctaaaattttatttttaattgacaaataataattgtatrtatttgtggggtacaatatgatgttttgatacrtgtttacattgtggaatgattaaatcaagccaattartaaatcaattacctcacatacttatcatttttttgtggtaaaaacacttaaaattattttagcaatttccaaatatacagtgaattattatttattacagtcaccattctgtgcagtagagcactaaagcttagtcctcctaactgaaattttgtactcttttatcaacatctcctctttcttatactctccactcctcctgcccgtggtaaccaccattctactctgcttgtttttctttttttttcttttgaagacagggtcttgttctgtctcccaggctggagttcagtggcacattaatagcccactacagcttcaatatgctgtgctcaagcgatcttcccaactcagcctcctgagtagctgagactagcttatttatttatttatttatttatttatttagagacagagttatgctcttgtcrcccagactgggatgcagtgacgtgatcccagctcacygcaacctctgcctcccgggttcaagcgattctcctgcctcagcctcctgagtagctaggattacaggtgcacaccacyatgcccagctaacttttgtatttttagtagagacggggtttcaccatattggccaggctggtctcaaattcctgacctcaggtgatctgtccacctcggcctcccagagtgctgggattacaggtgtgagccactgtgcctggcctatttttatttttagtagaagtgagstcttgctatgttgcacagtctgatctggtttccctgatgattagtgacaatgagcatttttttcatatagctgttgaccatttgtatgtcttctgagaaatgtctgggtactttgtccctgccaaccgctttttttttttttttttttttgagatggagtcttgttctgtctcccaggctggagtgcagtggcgtgatctcagctcactgcaagctccacctcccaggttcacgtcattctcctgcctcagcctcctgagtagctgggactacaggcgctgaccaccatgcccagctaaattttttgtatttttttagtagagacgaggtttcaccatgttagccaggattgtgttgatctcctgacctcgtgatccacccacctcggcctcccaacgtgctgggattacaggcrtgagccactgcgcccggcctaccaaccactttttttaaagatagggtctcgctatgttgcccaggcaaaagtacagtggtgtgaccatggcttactgcagccctgacctcctgggctcaagcaatccttccacctcagcctcctaagtagctggaactgcagccatgtgccaccatgcccgactaatttaaaaattttttttataaaaacacagtctccctatgttacccaggcaggtctgtaactcctggcctcaaataatcctcccaccttggcctatcaaaatgctgggattacaggcatgagccatcatgcccagccactttgcttttattttattttattttatcttattttatgttatgttatgttaattttaatttttgagatagagtctcgctctgttgccaggctggagtgcagtggtgcgatcttgactcactgcaacctctgcttcccaggttcaagcaattctcctgcctcagccgcccgagtagctgggattacaggcgtgcgctgccacgcccagctaatttttgtatttttaatagagatggggtttcaccatgttggccaggatggtgagtttttttaattccatatatatatattatatatatatgggttttttgttgttttttttttttggctattagcattagagggggtcattttgaaaagtcttcatcattcttggagcaccttcttactttctgacatgaggtgttccaggttcatcttagagtttctctgttccagccttggagacagccatttctctgaggagccctgtgtttgtttgcttttttttgttgtttttttgtttctttggagacggagtttcactcttactgmccaggctggagtgcaatggcgcaatctcagctcaaccgcaacctccgcctctgggttcaagcgattctcctgcgtcagctggtcttgaactcccaacctcaggtgattcacccaccttggcctcccaaagtgctgggattacaggcatgagccaccacacccggccgtttgcttgttttttagtggagagtggtattagaaactaagatatgaatgtcagatgtgctcatcattattggaatgtcagtgcttccaggccttctcagtggacaagctaggaaacatgggtaatgattgtgtgtccccaccagtaccactgacggcagtccagcactacagtttacrctccagttttctccctttccacatttatagctggtttcttcttaatatagttatttgatcaattccactgtgtgtaactaagttcccattgctgccctctcatcccccctcccccactggacttcctccttaccctattttgcctccagcaccccaaaccagcttgccaccctcccttctccttgtgtggacaggctcttctccccacaaaggctctgacacatcttgctgggctaccgcaacattctccctcacataccaagtgcagatgtctacattcctcgggcccacttaatgacttttgcactctgatttacatttttaaagcatctctgtggttgctgtgaagaataaaggaaggaggcaaggcaagtgtggaagcaggctactcacttaagctgttgtaagtcatggcctaggctgttgatgaggttggactagggtgctagtgrtgcaggttgtgagatttgggatcgtattagttgtctatactgtggaacaagttatcctaaacttagcttaagacagtaaatgttatctcacagcaatttgagtgtagcttagctgggtgcctcaggctcagggtctcacaaggttacagctgagatcttctctgaggctgctgtgctctcaaggtttgacttggraaggacccactgccacacttactcatgtggctgtagacagacctcagaagatttgcttcccagctcattcagtagacctctgcacaggccrcctcttgacatggcgtctggcttccccagaccaaggtggaaggmacagtctttttaaacctcatctaggaagtgatatcccatacttcagttgtctatttattagaagcaagtcaatcagtccagccacacttaaaatgagggtattatacaagggtgtgaataccaggaggcagtgatcgttggaggccctcttagagggtgccaagtaagatggggtcagcaggagttgctgattgattggcttttgagagaaaaaccagtcaaggatgacttcaatatttttggcctgaactactagaggtacagttactgagatagggaagagtggagtagggggagcaggtttagaagaggtagtctacgttaagtatgagaagcttgatagacgaccacgtgagaaggtgagtagacagttgaaaactagcctgttggttaggctagagattgatgctggagataggattttggtttgattttatctagtgtagtattcaacttaactttataaattaagggttaggagaatatgaccttcagttaaatgcctagctctgttatcctggaaaccagataaaattgttttaacagtattgcaatataaaatcgacctctgattgggaaattgcctctggattgagaggaattagaaatgcctggtgagtgctgctgctcttagaactggcatgaccctgtgrgaaagggaatcctgaagctatgcctttggagttaytagagacrttggctctggtggagcgtaaagctttgaagttagggcagctcctgcacctgyctcatgatgctctcatctcccttgagcctgagctgtgtcatctagggagttaaagaaaatagcttctgggccgggcgtggtggctcacacacagcaccttgggaggccaaagcaggcagatcatgaggtcaggwgatcgagaccatcttggctaacacagtgaaaccccgtctccacttaaactacaaaaaaaaattagccgggcctagtggcggtcgcctgtagtcccagctacttgggaggctgaggcaggagactggcatgaacctgggaagcggagcttgcagtgagccgagatcacaccactgcactccagcctgggcaacagagagactctgtctcaaaaaaaaaaaaaaaaaagaaaagaaaaagaaaatagcttctggacggctgggtgagctgtcacttgcatgaacaactgcacagactcccagggagaggaacatctgatgctgcccagctggcaagctgtgattcctgtcctctgtcctgagttctcaggtgccaagtgtggcctatgatagtcttatgagtctgttcagtagctgcataatctcacctagggaaagatttcccttagagacattagtgttttggatagaattttagtcagcttctctgtttcatttaatgttctctaatcttatgggraacattagaaatcttgtggaaaaatgagctcattttatctctctggtctaaaggccttcacttctttgaakctaccagccaccagtaaaggctgctaagtccaccagtacaaaaacaaaagatggtggtgcaaacttcttggatgggcagttgagctacacgtgccttgaaaataagaaacggattgcctagaacctaacacagtctgcttacaaacttgattcattcaacraatatatattgagcacccccctatatgtcaggccttgatgggtttatatattcacagtggygagtgaaatatgtatggtctttgttctyttgtagtttataggcacttaatgaatactagtactaatactgtgttctaatttagtgtctttttttacagtaccttcattttcctatatgttttattctcttatgggatcagcaacaagatattaatttcttcttcaggaatttatatttaatttgattgagtagaataccctgaaagtatttaagtagataacaaataacattttattttattttgaggcagtgtctcgctctatcacccaggctggagttcagtggtrcgatcttggcttactgcagcctcgacctcctgggctcaagccatcctcctgcctcagcacccggagtagctggggctacaggcaygggccaccatgcccggctactgtttgtatgtatgtatgtatgtatgtatgtatgtatttagtagagacagtgttttgccatgttgcccaggctggtctcaaactcctgggctcaagctatctacctgccttggcctcccaaagtgttgacattacaggtgtgaactaccgtgcccagctcaagtactattctatactactttttctttctttttttttctcttgttcttgtctttattttgttcaatgccaattttattgccttcagttttattctgaagttatctaattgccaccgtctacacagtaacacacagaagtcttcattttcattgttatggtagttagcatttatatagaattagtgtagaaaagtagaaagtttgggctatttcatgcacggctgtataaaattattgttttcacttgtatcagaagaaataaagatgtgctttttgtggtttgaagtattggaaccttgaagtcctttgaaccaagttaaaaaaaaaaacaaagcaagacatggcttggttagatttttctctattgcacgtataccrttttcccacttggtggcactttctgttcrtttcttagtaacatgtctttctctctcagcatagttacaccagtctctcctcgtacattgatttttcttattaaaattaatttactgaagtaatacataaatacatcatttaaaaaataatagtgtatggtaaagggtttcttttttttttaacagaaaataattttgtccctgaaaatttttctgtgcccagggaaaaattaataaatggttttgcccttgaaaggccaatttgtttaagatgcttaacgtcrtggtggtcagctgtttttcatttggcgtgatgtgttctagaagcctttgtagagaaacagggtggcaggtgagggccattacatggaggcgatagagaagaatcaaggatgattcataggtttggggcctgagtggttggtaccataatgctgggaccattcactgagatgagaagacttgtagaagggcgggttggtaggggtggagaattagaatcagaagcctctttttggacatagtaagtgtgtgatacctgttgtgaaatctacatgattagatatatatcaagtaaacagctgaatatacaaatcgagcttaggacaatggtcaaacctgccaaaccagcaaagaacaaggtaagtagctagcaaggtaggaggaaagggaagaaagaggagtatttcagccagggaagcctcgttgtattgattgttgccaagaggttgaggaagatgatgacagaaaaatgtccgtgtgatttggcaatatgaaattcattgaatctacatagaatctgttcttgaaagaaatgaggagagatcagaaaagtttgaacattctagcaaaggagagtgatccacatagcccctagtagacatgcactgtcaatattggacatagttccattaatccttttttttttttttgagacagggtcttgctcttgtcacccaggctggagtgcagtggcatgatctcagctcactgcatcctccacctcccaggttcaagcaattcttgtgcctctgccacctgggtagttgggattacaggtcccatgaccacacccagctaatttttgtatttttttttttataggggtggggtttctccatgttagccaggctggtctcaaactcctggcctcatgtgatccgcctgcctcagccttccaaagtgctgggattacaggtgtaagccacctcaccccgtccctttttaatcctttctgtgtagttgtgttcataaccatactccattttacttgcttttttccatcaatattataagcaatttttcatgttattaaaacaatccttataatcaccattaaaagattttttctgattataagaatatacaattgctatagaaaatttggaaatctggagaattattaatatgaggtagaaacaattctttggcccagaagcaatactgttgatattttattcactgattcaacaactatttgagggtctgcttttgggtagagaaagaatgttttgggggtgtttgttttagaggtggggtcttgctctgttgccgaggatggagtacaggagctattcacaggtgcaatcatagcacactacagctttgaactcctgggctcaagcatcccccctgcctcagcctcccatgtagctgggactccacagaggaatgttttttaaagaccacagtgtgaaaaactgattgtagtttattggtcacaccttctttagaagaaagcttattattataaataacatatacctacacatttctcatataatgtatacaacattttctgacttgcttctccctcccctcacttaatatgtcacagacatttttcctgtctcactaaatactgtgtcagttcgagtgttttagtttctgtggggcttttgtatttagaaaggattgttgggcaatttggatttaaaattaatatactatttattatagttgcaaatttaaaaacctaattgtttttcattcttgaggttcaatttataaataggataaaaagattagtaaattgaattactttttgcataaaaataaggaacaatcattttctcttgttctttgatgaatgttcggtaaactctaatggaaaggattacattgtcctaaacagtaatacccatttgcaaatttagttaatacatctctttaagcagtttagtcacatttataaattgaacatatttgatatttgagttttttcaattcttcaaatccccagtgcataggcagattaacctatcaagcaaaatgttcctaagcacttaaatgactcttgtttactcaagcccaaaacttcagtgtcatcccccagtctaattctctaatgtccagtctgttagcaagttcatcctgctttcgtttctccatatatcccacatctcatcactgcctctatgactgttaccctagtccaaggcacaattatctcttgcctggacatctacagtcacctcccaactggtttgataacattcttgcagtgcactagcgttcccaacatgctaagtgatgagagtgcatatttttaaatgtaaatcagacacatcaagtctctgctcagaatgacccagtggcttcccatcacagtgagagtaaaaaccccaactccttccatgctctgcgaggcgttatgtgatcacagtctgcatgcactgtcctagtcacagccctgttgactctgacttggccacattggccttcttgcttttccttgaacagtgaacatactcccaactcagtctctgcactagctgtttccccagatttggcatggctcacacaccttcactttattcaagtgcccatctggtggctcttcaggtggtctagtctataagagccctgttccctctcatactccatactcttcccctgctctggttttttccttgatggcacttaactacctctgcttaacattttttttatattatttaatttattgtatgtttccccaaataccatgttggaacagtgcctaccacatagtatttctgcaatagatttttgttgaatgaatggatgtacatatacattttacttgaaacaaacattattttttgggtatgataatcagttttcttcactttagctgatccaaaaatgrcatcttctgctactcstttatagctttctaatgaatttgaaactagatttacctctgaattacattgcaatttcaacctgtcctttttagtactttgacccactgaatcatttgttacagttttgtggggttttkggggcaggggcggaggggtgttttttttttttgacacaaggtcttgctctgtcacctaggccaagtgtagtgccgtgatcataactcactgcarcctcaaaatcctgggctcaagctatccttctgcctcagcttcctgagtagctgggagtataggtgcatgccaccacacccagctaatgtttttgtttttgagagagaaggtgtcaaactcctggcctcaagtgatcctccaaccttggcctcccaaagcactgggattatatgtgacagccactgtgcctagcctgttacagtcttctaaaatattatttctctaaataaattgctagctgtcaatggcagataatattttcttcaaagtaagtccttcctaatgtttattttctgctccagaaaaatcagaatattaggagactgtgttctaagaaactayaaamtgcattaattgggtagtttctcttatgttacagaatgttacttttctttataccctttctctgttaaaatgtgttcattataagcagaagacaagattgttttgatttttaaaactcagcttttatttaacacatttcactgagtattcattgcttcatttaatattgattctaacattttacaaagatgccttgttggaaaattccatatgtggratgtggaaataaactatgtattactcttggtgaatgaggaactgctcagcatgttcattatagaaaattcaaaaaataacaaaagaaataagaatagcctgttatccyaccacttgtagaaaccactgctattaatattttgatayacatttgaccttcagtatctgtgggttctgcatccatggattaaaccaacattagatggaaattatatcagaaaaaagttcacaaagttccaaaaagcaaaacttggatttgctgtgtgccgagtattatgttgaatccacatgaatgaagtcatatgcagacatcatattaggcattataagtaacctggagatgatttaaagtatacaggaggttgtgcataaattatatgcaaatgctacatttgcatatccacaaatgatcatttgtggattttggcatccacagggtgtcctggaatcaatcccccatagayactagggacaactgtttattcttatctcctcgatttctatgcatatatattcttttgtttttgktattaatgtaattgagctttttgaagaagtagcctgggtttgcaagttattttaacttttggcagcctggttttctcacttactatatttggataataatatttatcacgagttgttataaggatcaaataggttaatatttgtaaagtgtatagattagtgcccatgacttataaatgytatctataagtattaaataaattaggcaaataacccgcttttaaaacatatatggtgaacattttctcaagtcataaaatattctctgtctctctctctcttctctttttttagaaatgggatcccccgctgtccaggcacgatcatggctttctgcagccttgaactcctgggctcatgtgatccctgcctyagcctcccaagtagctaggactacaggtgcctgccaccatgcctggctaatttttgcattttttgtagacatggggtctcatgttgcccaggctggtctcgaactcatggcctcaagcgatcctcccaccttggcctccagaagtgctaggattacaggtgtgaggcaccatacctggccaaaatattatctatagcataaatgttaataatgccttagtcttccatcatatggatatgccatgagctattccctttatttttggttttgttctttccattctttcactgttataaataaagctctgataaatatccttgtacatgagtattcatatcctcatttccttaaatggaaatggatccaccaggagtatacatgttttataagtttttgatacctgctgccaaattgccctctagaagggctataccaatttatattctcaggataaatatattgaatagtatatgagtactgatttctctttaagttcactgattctgggttttattttttaaaatctttgctaatttagcaagtaaaaaattataccttaatgtgcattgccttgattaaacttcattgtttgccactataattttttctttgttgacatctcttgatgttttttgtccagttttctattggatatttgactttttctgatttgtaatgatagatgaaccttttttctgtatattacaaatattttcccctgtttcttttagtctttaatcctgtttatagtgttttaggacatacacttttcaattttaaaaacaattttaattttttgggtacatagtaggtgtatatattatggggtgagatgttttgacacaggcatgcaatatgtgatcatcacatcatggaaaatggggtacccatcccttcaagcatttgtcctttgtgttacaaacaatccaattatactcttttagttgttttaaaatgtacaattaagttattatagactatagtcactgtgttgtgctgtcaaatactaggtcttattcattctttctgactatttttttttatacccattaaccatccccacctccccctaatccccaaaccaaccccactacccttcccagcctctggtaatcattcttctactctctatctccatgagtgcaattgttttgagttttaagtatcacaaataaatgagaacatgcaatgtttgtctttctgtacctggcttatttcacttaacgtaatgatctccagttccatccatgttgttactaatgacaggatgttgttcttttttatggctgaatagtaccccattgtatttaagtatcacattttctttaytcattcatctgttgacagacacttaggttgcttccaaattttggctgttgtgaacaatgctgcaacaaacatcggagtgcaaaagtctcttcgatatactgatttcctttcatttaggttatacccagcagcatcattgctgaatcatatggtakctcaatttttagttttttgaggaacttcctaactgttctctataatggttgtactaacttayattcccaccaacgygtttgagggttcccttttctccgtatcctcccagcatttattattgcctgtcttttgtataaaagccattttaactgggatgagataatatctcattgtaggttttttttactgctccttgtggaccagagcggtagccttaatctcagcactttgggaggccgaggcgggcaaatcactggaggccaggagttcgagaccagcctggacaacatggtgaaaccccgtctctactaaaaataaaaaaattagcccggcatgatggcatgcgcctgtaatcccagctactcgggaggctgaggcaggagaatcacttgagcccaggaggcagaggttgcagtgagccaagatatcaccactgcactccagcctgcgccacagagcaagactctgtctcaaaaaaaaaaaaaaaaaaaaaaagacccaagagtctgttttgcaagtaaaactctctggtgtggcaatctgaaagatatgatttttttttaccccttatttaataataaaataacaagggttatatttgcctagcagactataaacatttccttatttcttataattctttataaactgccataatgggtatagtttattatttattaattccctgattcttgcatgtaggcttgctaggataaatattttcagattttgtgtattgtgataaaaattatcttttccttttttggagcattttccatttctccatgagctcttcacttcctcacttaagtaactgaataggcataagcttgggactatggttccttaaatatcattttaaccttccggagtcttgacagcaattttttgaataaaatttttctttagttaagctgactcagtgaggtaaaagttaaatatttcagctgtgccgtaagctcacataaagccccttgataagtgacagccttgactttaacagctaatccctcctctgagtggttagtggagcctggctcaccactatcgtctcataagggcttcagcgctcgtgtgctcatatgaatggttacagtttattggtccaggtcactttcactaatccccagcttcctttagaggatgtaagacagacactgacctagcttgtacagccttctgcattcttcattgtataagctgatcatgatacaattatctttagacataaacatagcaactgtaatcatattttatctctattcagactggtttttagtcagttacctagctatatctatcaattactgctagcaaatattcttaggtttacatagcaacaaaaattttttctcattagctttagttttagttattccactgaaacatcctcctcttgtccttttctctgcagctagataatcacttttccccccacccccgggctgcagttctgtggctgtcttctcattttcttttcccccaataaggtcatctctgtcttgtgagctccaggtcttagaggctgggacaaattctgtcttcccttctttcccatgtaaacccctcagcttagcttcctgcactctgtcccacaaactttgattcctcctttccctgtcattagcagcagcrtcggtggtctcttccctttcaactccaggtatccagcttttaggtcggatttctggaacatatcctcttaaattgttaagcacttatgactgaaatatttgtgaattgggggtcgatttaacttttttctcaagacagggtctcactatgttgcccaggctggtcctgagcttctggcctcaagtgatcctcccacctcgtcctcccaaagtgctgggattatagacatgagccactgtgcctggccctgatttaattttttaatataacaagttgcatattctctagtgtttacactcacatgcttgaatttacaatgcatcaggctcttctcagcaggagcctcatgggttttaaactaaaccttcatgagccagagtaacctgagcatactgaaaatccagaatcggcctctagcacctaatagtaatactgtatttttatcagttctaaaatgcatttccacgtctaaaattaggatacatattataatcagtagtggccataatttatttggtagcatcttttctttcttagaggtagataaaatcatggcatgtctgaaaatggatagtgtcagatttgataagatacagtaatgggccgggcatggtggctcatgcctataatcccagcactttgggaggctgaagcaggaagatcccttgagctcagaagtttgagatcagcctgggcagcatagtgagatcctatctctacaaaaatcttctgaaagtcagccaggcatggtggtggcatgctcttgtartgttagctatgtaggaggctgaggtaggagtatcacrtgagcccaggagttcgaggctgcaatgagccatgatagtgctacttcattccagcctgggtgacagagtgagaccctgtctccaaaagaaagaaagaaagaaaacgaagaaaaaaaaatacagtaatgagaacggtagctaacatttgttgcgtatctgccacacacaagaatttttctatgtgctttatgtctattatctccttttatgtttataccatccctgaggagtagggatgttcagatggaaaaaatctaaggcatagaagaattcagctagtaactgatggagttgaggcttgaacccaagcaacaaaatagttccagggctacgtttttaaccgtccttccactatgctgtactgcctcttcataactgtttgggttttttcccctctttaaggcatcgttggcttcacagtatgactgatgatcctccaacaacaaaaccacttactgctcgtaaattcatttggacgaaccataaattcaacgtgactggcaccccagaacaatatgtaccttattctaccactagaaagaagattcaggagtggatcccaccttcaacaccttacaagtaaagacaatgaagaacagttgaaacrtgcaaaatatggagcttttcatgtaattactcttttactgtttaccattcactataattcacaattaaaattgtgtgactaaacaatgtctttcgtgcctttttgcccttcactttgttgttttccaactgcaaaatagatgcttccaaacatggtgattgaagtagacttgtattggggtagctgcctggtttacagttcccttttctggaaacagcctctgtggtcctgtttgtgctttgggaccgtaccttactaccatagctcattatatgggaagacctaagccaagccagattttctcatgggaatttggaacttgaatggagagacacgaaggctgaaagtcatcaaaactgggtggcttttattgacgctctctaaggaggttatcagagatatcgtatttcctgagtctggttctttaatggttcattttaaactgtaaactatcctagactctattccaatatattcttagttctttaagctaactagggtcacagattttttttgttgcttacaaataaaaaagtctttaatatccagattggtaccagaggtaggcaaaagaccttcaaggaaatgatgcgggatctttggaactggttgttgtgtctgggtagggtgaaaggcccacatctctctgcattccagatggaaagctcacagctccagtgatcaaggagcttagcaggctattgcctttagtcaccagaatccatgagcccccttaggataaggcccctggagactggttagcagccaccatggaacaatttaatagcaatggaaagaaatgctaggattatggagtcaggtggttgtttccaagggcattgaatgacttaagagagaataaaccttgattctcaaatctcaactcaaggcatcaagtgtgtgaaaggaaaataagtcttgggaccccaaaatcactaagccaagggaaaagtcaagctggaaactatgtcaggcaaacctgacccccattttatccctaaataagatattaatagctacaaagataaaaagctacatatctccttccttgaaattccttgtggacaaaggacagacagaactcaaagtcatctctgaggctcactggagataaatgcataccgattgcttcctctgccttattgtttatttaaaaatacggattcactgagccggactaaagtgtattcagtggaaggctgctcaagaactcaaaagaatgcaaccttttgtctcttatctacttatgacctggaagcccccatctcaggttgtccagtcttacctgacggaaccagtgtacatgttacacatactgattggtgtctcatgtctccctaaaatgtctaaaagcaagctgtaccctgaccacttgggcacatgttgtcaggacctcctgaggctgtgtcagagccacagccttaacctcagcaaaataaactttctgaattgattgagacctgtctcagatacctttcgggttataagtgaaacacagggtaattatatgagttagcttacctccttggtttcctatatgaaaatgaagggatagagtgggaccctgcctattggtatagggacatctagaaggaactagaacaatggtctttgcccttggctgcatattagcttttttataatctagaagccaggcaatcagaccagcatctctgaaggcaggttccaggcatcagtaatttttaaaacctctccctgcacccaccttgtggttccatttacagccaatgttttgaacaactgtgctaaagaaccaacatgcaaaaaccagttattttgaaacttcctcattcataagaaactagtctactacagccctatgtcctgagtatcccttacttagctggatcaggttgaattcagtgccttcaagagactattcagtgtgctgttttggctttttgagccctggacttttgagacagcatataacatacaggtgttttgcacttatttatttacctggtgacctgaaaagctggcagagcaaaaatagtccctgtaggtggcccagtctgcagtccaagcagctctgctgctcagccctctcaaagtatctggctgattgggagacttattgaagtcagagacaaatttctccaggagaatcacaatggaagcccacaggactttggagcaaggtcatacccccttctggaagattactattctccttttgagaaacggttctaatttgcttctggggatgttggaggctatgggacaccaggtgctatttaatccatctactcataaagttgaccatttccagcagcactccatcacctagcaggtgggaccagacaggccatgaagacacatttcctttgaacagatttctcccgaccctgtgcctttaactactctattcccacacctcgcccctaccaatctgtccctttacccttgtggagcattattatccagttaactgaaaatgaaaaaaaccaaacctggcttacagataccatgaacaataggcactatcagctagaaatgtactgtgtatatttggggtggtcttgaaggacagtagagggcaaatctcaatttgtaggcagaattccaagcactgtcttttatcatgtactttgacttgagrgaaacatgatctgaggtgaggatctgtaaccgtaaccagtcactggctagatagtcagagatggagaaaagcaacatggaagattagtgtaaaagttttgggaggagcttggcaaatgaaccttgaggcttggagctgtaatccaaaaagatttagaacaaagtagccagatgattactgagatcaccttctgggaacaaatctttgtctcagtgcctacttcttgaagatcccaacagaaaacacatatctaagcccagtatcgtcaatgcggcaagttcatttcacgggacttcttccatattggagggagagatgatttgtttttgtgggaataggcacttattctgaatttgggtctgttttccttgcctatcatgccttggtcaacatcagcattcatgggattagaatgctttctaccttgtcatatgtaggacagtgtccgtggtggagaaactcacttcacagaaaagaaaagaggcctagtgcagtggctcacacctgtaatcccagcagtttggggggccaaggcaggcggatcacctgaggtcaggaattcgagaccagcctgaccaatatgatgaaaccccgcctctactaaaaatagaaaaattagtcaggtgtggtggcatgcgcctgtaatcccagctacttgggaggctgagacaggagaatcacttgaatccgggaggcggaggttgcagtgagccattgtactccagcctgggcaacaagagtgaaactcccgtctcaaaaaaaaaaagacagtggaactgcctgtgggagtccctgcttgtgtttatgatgtgccttactgacctacctctcagatatcatctctcatttctccctccatcacccactacaggtcagccacacaagcctctgtctaatcttcaaagactggattcattctcgtcttaggtctttgcacttgctcttccttctgcctagaatattaacatctttgtgttgctcctttttttggtatcattcatatcttactttacaagtatcacctcctcaacagaatgttctgtgtccatctaatctaaagtagcttcctcaggaacttcctattattgtttatttgtatgaatttccttgttttattttattcatagtacttattgttactttttgggaaaaggcctgaacaaaattattccagtaaagaatctgtgtattgagcatttactaaacagccactgtccacctacaaaagcactctacatgtagacataatgaagcaaaactgtattgattagatttagggcagggtgcagtggctcacgcctgtaatcccagcactttggaaggctgaggcaggcagatcatctgaggtcaggcgtttgagactagcctggccaacatggcaaaaacccgtctctactaaaaatacaaaaattagccatgcatggcggcacatgcctgtagtgccagctactcaggaggctaaggtaggagaatcgcctgaatctgggaggcagaggctgcagtgagctgagatcacgctgccgcactctggcctgggccacagagagacactctgtctcaaaaaaaataataataatttttgttggaggtgagatagtgactgaaattaaacagcggcagcccagaacagtaaattctgaagtttcagaaagtaagaattcttgtgggaaataacatctaaacatgcaaatagttatacataggaaatttctaaagtttcattaagcaatttttacaggaaaaaaagaacactaattaccatgatgtcatgctgtgtttccaaaaaattggtgatcatttcaagggtttgcaatcacttgtgtgatcagcttgcaaagacctgtcggtctatatccccgctttcaagtcatccttctatgaatggagatgtcctgttcctaacattcttctcaaatacaagttaattcatacactggtgccaagtgcccatagtatgaaatgcacacatcataagagcatagtaatggagccatatttatcagctctggctccaggaagttaatgtctgtgtatattttttgttttttaggccgagtctcactctgttgcccaggccggagtgcagtggcgcaatctcggctcactgcaacctccatctcctgggttcaagcgattatcctgcctcagcctcctgagttgctgggattacagatgcatgccaccatggctggctaatttttgtatttttagtaaagacggggtttcgccatgttggccgggctggtctccaactcctgacctcaagagatcacccgcctcagcctctcaaagtgctgggattacaggcgtaagccaccgtgcctggccagaaacgctgttttccaggctgatgtctgctgtctgagaacctggttctacatgtgcctgaagtacattcacttacactcttcaatgacatgaaccagtaaatgaaccagtaaatttccccaactattttcttatagcttgacttcaaatctgtattgacttatgcttctttcacttgcagctgaatgtcctcactgatacagcatccttatggctttattacttctcctctagtaatagaatttgttactgctgtgtactatcttcctttctttcttcattttcctttcctttcccttttcccctttcctttcctttctttcttttttttcccccctccccttcccttccctcccctcccctctcctttcctttcctttttttttttttcttttttttcccagacacaggttcttactctgttgcccgggctggagtgcagtggtgcaatcatgactctctgcagcctcgacctcctgggctcaagtagtcctcccacctcagcctcccaggtagcttgaactataggcatacaccaccatgcccagctagttttttaattttttatagagacaaggtcttcctatgttgcccaagtttgcttgctcctctcctctcccctctcctcccctccccttcccttccctctctttcttttttttttgacagagtctcactctgttatccaggctggagtgcaatggcgttatcctggctcattgcaacctctgcctcccgggttcaagtgattctcctgcctcagcctcctgagtagctgggattaccagtacccgccaccatgccccgctaattttgtgttttcagtagaaatggggtttttccatgttggccaggtaggtctcgaactcctgacttcaggtgatccacctgccttggcctcccaaagtgctaggattacaggcgtgagccaccatgcccagccagccacctttcttactagatgtagccctgattattaatcttctgattcataactcttggcatattatgaaccagtagtgtttgccaggatttattactataagctaataaatagctttatttaaaaacttaaagtttgtgttgaaatggatacatgtattccataaaacctctgcatgtacatttgaggatatatccgggcctttaaaatttctgtaagtgatggctctacctgattccagttgcagagaagtcagatttacagatttgcctgcatgtagcctggacttggaagtttgagccacaataaaattgctaaaaaaaaaaaaattggcagtcatttttatgtcactaaataagggtaagcatcagcctc

SEQ ID NO: 93985 - DNA, 79096 bp, Homo sapiens
  misc_feature (1)...(79096): n = A,T,C or G
atttctaaacacataaaacctatcaatcttgaatcataaagaaatccaaaacctgaacagaacaataacaagtaatgaaatcaaagccataataaaaaatcctccagcaaagaaaagcctgggatctggtggcttcactgctaaattttaccaaacatttaaagaagaactgatcccaatcctactcaaactattccaaaaaacagagaagggaatactttcgaactcattctacaaggccagtattatcctgataccaaaaagaaaaacacatcaaaaaaagaaaactacagaccaatatccctgatgaacattgatgcaaaaatcctcaacaaaattactagtaaaccgaattcaacaagacgttaaaagctcattcatcatgaccaagtgggatttatcccagggatgaaagaatggttcaacatacacaaatcaatgtgatacatcatatcaacagaatgaaggacaaaaagcatatgatcatttcaactgatgctgaaaaagcatttggtaacattcaacatccttttatgataaaaaccatcaaaaaactggacatagaagttacatacctcaacataataaaagccatatacaacagacccacagctgacatcatagtgaatagggaaaaactgagagaccttcctctaagatctggaacactgcaaagatgtccactttcaccactgttattcaacatagtactggaagtcctaggtagaacaataagacaagagaaagaaataaagagtatccaaactggaatagaagaagtcaaataatccttgtttacagattatatgatcttatattttgaaaactctaaagactaccaaaaagcttttagaacatataaacaaattcagtaatgttggctggctgcagttgctcatgtctataatctgaacattttagaggccaaaacagaaggattgcttgagcccaggagttcaggatcagcatagggagactccatctcaaaaaaaaaaaaaaaaaaaaaaaatagctgggcatgatggtgcatgcctgtggtcccagctactcaggaggctgaggtggaaggattgcttcggcccaggagattgaggctgcagtgagccctgatcacaccactgcgctacagcctggatgacacagttagaccctgtttcaaaaaaaacaaaacaaaactcagtaaagttacaggatacaaaatcaacatacaaaaatcagaagcatttatatatgccagcagtgaacaatctgaaaaagaattcaagaaagtaatcccattaacccatttataatagctacaaataaaattaaatacctaggaattaaccaaagaagtgaaagatctctacaatgaaaactaaaaaacattgatgaaaaaaacaattttcaaatttatacagatccacaaaatacccataatagccaaagctatcctgagcaaaaagaataagactggagaaatcacattacctgacttatcaaaacagcatggtagtggtataaaaacagacagacctatggaacagaataaagaacccagaaataaatccatacatctatagtgaactcatttttgactaaggtgccaagaacacatattgaggaaaggacaccatcttcaataaatgtgctaggaaaactgaatatccatatgcagaagagtgaaactagacccctatctctcaccatatacaaaagtcaagtcaaaatggattaaagatttaaatctaacacctgaaactatcaaactactaaaagaaaacactggagaaactctccaggtcattggactgggcaaagatttcttgagtaataccccagaagcacaaacagcccaagcaaaaaatggacaaatgggatcacatcaagttaaaaagcttctgcacaacaaaggaaacaatcaacaatgtgtaaagacaatccacagaatgggagaaaatatttacaaactattcatctgacaaaagattaataaccagaatatataaagagctcaaacaactcaaaaggaaaaaaaaaaagtctaataatctgatttaaaaatgggtgaaagatctgaatagacatttctcaaaagaagacatacaaatggcaaatagaagagggcgcggtgggtcatgcctgtaatcccagcactttgggaggctgaggtgggcacaacacttgaggtcacgagttcaagaccagactggccaacatggtgaaaccccatctctactaaaaatacaaaaattagccagtcatgctggcaggtgcctgtaatcccagcttctcgggaggctgagacacgagaatcgcttgaacccgggaggcagaggttgcagggagccgggatcgtgccattgcactccatcctgggcgacagagtgagactctatctcaaaaaaacaaaaaacaacaacaacaaaaaacccaaatggcaaatagacatgtgaaaaggttcttgacatcattgatcatcagagaaatgtaaaaaacattttctttgctcatccaaaactacagtgagatatcatctcatctcagctaaactggcttttatccaaaagacaggcaataacaaatgccaacaaggatatggagaaaagggaacccttgtacacttttagtgggaatgtaaattagtacaacccctatgaagaacagtttgaaggttcctcaaagaactaaaaatagagttgtcatatgatccagcaatcccactgctaggtatataccctaatgaaagcaaatcagtatattgaggagatatctgcactcccatgcttattgcagcactgtccacaatagccaaaatttggaaacaacctaagtgtacatcagcagatgaatggataaagaaaacatggtgcatatacacaatggagtactattcagccataaaaatgtatgagagcttatcatttgcaataacatagatggaaatggagatcattatgttaagtgaaataaaccaggcagaaaaagacaaacttttcatattctcacttatgtgggagctaaaaattaaaacaattgaacacatggagatagtagaatgatggttaccagaggctgagaagtgaagtgggtgggggatgtttaatgggtacaaaaaataattagaaagaatgaataaaacctattatttgataacacaacacagtgactatagtcaataataatctaattgtacatttaaaaataactaaaatagtataattgattgtaatgcaaaagataaatgtttgaaatgactgataccccatttaccctgatatgattattaggcattgagtgatagtatcaaaatatctcatatacccaataaatatatacacctgtgatgtacccaaaaaattaaaaattcaaacaattttaaaaattaaaaatagatattttgttgctaaaaaatgctaacagtcatctgaaccttcagcaacttgtcatctttttgcagttggagggtcttgccgcaatgatatcgagggctgctaactgataatggttgctgaaggttggggtggctgtagcaatttcttaagagaagctaaaatgaaatttgccacatcgattgactgttcctttcacaaaagatttctctgtagcatacaatgctgtttgatagcattttacccacagagctttcaaaattagagtctatttgggtgttgaaacttaatggcaaaacaaacaaaaaaatagagcctatctctcaagctctgctcctgctttatcacctatgtttaagtaacattctaaattctttgttgtcatttcaaaaatttttacagcatcttcaccaggagtaggttccatctgaaaaaaatttttttttgctccataagaagtaactcctcatccattcaagctggtttttctgtttgttttcagagacagggtctctgtcacccaagctgtagaggagtgcagtgacatgatcacagctcaccatagcctcaaattcctagatccctcacatgtgcagttcacaatagggtttgcgctcctgtgaaaatctaatgctgctgctgatctgacaggaggtggagctcaggcggtaatgctcactccccgcccatccccaccctgcctccatcccccgccctgcaccttctctgctcacctcacgctgtgcgtccttgttccttacaggctagggaccagtaccggtccaagggccgggggttggggacccctgttctagttaacttgctgcagctcctacatcagtatttgctgcttcaccttacacttctatattatgaagacagcttctttccttaaacttcatgaaccaacctctgctagcttttaacttgtcttctgcaacttcctcaggtctctcagccttcacaaaattgaaggcagttagggctttgctctggattcagctttggcttaaggaaatcttgtggctggtttgaccttctatccagaccactcaaacgttcttcgtatcagcagtaagtctgtttcactttcttatcattcatgtgttcactggagtagcacttttaatttccttcaaaaacttctcatttgcattcacaacttggctgtttggtgcaagggggcctatctcagctttcaacatgccttctgcactaagatgaatcatttctagcttttgatttaaagtgagagatacgcaacttttcctttcacttgaacacctagaaaaccattgcagagttcttaattggcctaatttcaatattattgcgtttaagggaacagataggccccaggagagggagagagatggcagagtagcctgtcagtggggcagtcagaacatacacatttattgattgattgctgtcttctatgggtgtggtttgtggtgcctcaaaacaattacaacagtgatttcaacttatcactgatcatagatcaccatagcagatttatgggaagaaaaatgataaacgcaatcatattggtagtgttctagtcctaggttcgttcatgcatgttcatgttattgataagcaccataacttcaatttcatatgtataaaaatgctcaaaaaagtgtacatcctcttttagcactgtagtgagtcaacattccccaacaaaaactggatttcctgaaaaacaggttaaggtaggaggttgggggggggatgcttttcagaatggcaaaggtcaacatgtatcatcttctgtaagtaaaatgtatgtataggcatacctttctttcagtttaagacaagggggtgtagtggggaattatcgtgtaaaactacaccagtatcttaagcatgaaaatcaattatatgcttttcttttgtttgttggtcaaagaaaaagattataactcagaaaactttcttggagatgcgtatgctcagtgtatccaaactttaggcatgtcaggtacaatattgatttacaaaaagttcctctaatcaatcctgagctaataacttactgtggaaagagtaattgatcagagccatccctccaattggagtcaacttccatgactgttcggatttcctttattttgggggcagttcatccaaacttctattaaacggcaactagttcacttttgagaagtggtttacaagaaacaacaacaacaacaacaaagcagttgcggaggaaagaaaagagacaaagtaaaaaaaacggaaaagaaatctcccaggagaaagggatgtggaagctgaaaacacggacaatttccacagtaagacttccaaaagaatgtgcaagatccgagcaaaactttcaagggctctttttcagtgtaatggtagtgagaaagttcagcctggaaagcccagggcttaaaacaacaacaacaaaaaacacaatatgcaggatcgttcggcttcagcagaacccaccgcaaagatggcggtgggacgaagccccttctcccgccgccgaagcctctcgcctcacatttcccacaaacccttcgcgccgcctcgctagccgaaacctgcccagccggtgcccggccactgcgcacgcgcgggacgacgtcacgtgcgctcccggggctggacggagctggcaggaggggccttgccagcttccgccgccgcgtcgtttcaggacccggacggcggattcgcgctgcctccgccgccgcggggcagccggggggcagggagcccagcgaggggcgcgcgtgggcgcggccatgggactgcgccggatccggtgacagcagggagccaagcggcccgggccctgagcgcgtcttctccggggggcctcgccctcctgctcgcggggccggggctcctgctccggttgctggcgctgttgctggctgtggcggcggccaggatcatgtcgggtcgccgctgcgccggcgggggagcggcctgcgcgagcgccgcggccgaggccgtggagccggccgcccgagagctgttcgaggcgtgccgcaacggggacgtggaacgagtcaagaggctggtgacgcctgagaaggtgaacagccgcgacacggcgggcaggaaatccaccccgctgcacttcgccgcaggtaaccggggccagcgtcccctcgcctcgctccagaccccacctgcgcagccggggcccacaggtctgaaaccagtgctcctccgcctcccgacctttctccaggactctggtcctggtgatctcgctctcttccagtggggactaaggagattaggggtagggtgagcgtgccacactcgctggaagttttttgttttgtcttggtttggtttttttgccaggtgttgggggtggtttggggttttggctttgttttgttttacagtatcaacaatacctgtaccaacttccggtcttgttaccctagaaggcctctacacacaagaaagagtaggggacgtagttgatagaccttatgatttaaaaggtcagttacctccaaaatttttcgttcttgcaagttccatttgggttaaggtcttgaaggactttgtaaaatacaaggatgtaatttaggaggagtagcttaataggacgttgacacattagcgttaattggtttatcagaatagccaatcattaccaagtttctggagtgactagaacgggaaataggcaagtttgggagaactgaaacctgacttaggctgggtgcgggaagccttagacacacacacatacaagttgggcggaaagtggtagtataagagaaaagatagtgcaagtactttagcttgaatctagaatttaagttgggactaaccttgcttcattctgaaatttagatcgtttgaattacattattttaatatttattaggttcactttatgatttaagcatattaaatttagtcgaaaaatttaaaagagccatagatgggatattcagcttattcccataaagcatgcatgctgttcacttgtaggaaagatgatgactgtttctaacttcaggtgagtcatgcgtgattgaaaatgggagtacctcctcttacctctgacaatcctggttttttgttttgtgtatttcatgattgtttaaaacaattttttgaaaaatcggggaataccttttaaagtaytcctgttcttttggggctagattgatgaagagaaaaggagcagtgagaaatatttcctctttcacagatattacttttacrctttctaccaattggagatttgttcgctttaacctgttccagattttaaatgtaaatactaccaggaggtatgcttttttgatcaattgcacctttgttggatttccattggggagtcttttaaaaagaagaaagtttagggaacctaggtgggagaactagaaacggtttgtgggcaatggaaagagaaggaagaatacttaagtcaaacacacctagttagcctttttgcccgaaatttcggtggtaagtgctgccgttcttcagctaatttaggttgtcctgtttgaccatgtagtcaacatttaaacaactcatttggcaaactgtcacgatcaactgatacataagccaaagggtagggttacttagattctgttcacttgatctgtgggataaaaataaccaagaaagatcttagttgctacctttcaagaatttggtgtattagtgagttcatatctgaaaatagtaatatttagaggtgtaagattatgttattagatcctcagtgaccttgttccttctctgccttcccaccttcagttctgtcccaacgtttcaaagcatattttttacataggtttcattttgttcaagtttggaagacttaatattttggaaaccaacccacccctcacaacttacccaaattatcaggtataggttatcagattaagagttaaaggtataaaaagggagtaataaaaattatgaagtgggggttcttcattcaaccagagcttttgaagtcctgcacttcaatcatataagaaacttttttaaaaattgggtttgtaaatttaatctgaattttaggttcatcagagagaagctttttaagtgcatccagctaccttttcacttaatatatggagaatatactttataatctgttgtaggtagtgagttatcagtcatgttaatgtgcctgcaagcatactgttggaagttcaacacaggtggtggtattatgtaactgcctgatcaagcagtttcttgtgtttgtacttcagtcatagagtgagctattggaggtgatgggggacatcattattttaaaatttttttagctgattaaagtttggagattttactgggggaggcatgtttttgtctttttgttttgattcccaagtaatattaggactgagagattcgtgcagaccacagaaaatgaaaattagtttagaaaacatttgctttaatttcatccccaaaagttagttcaattaaaagaataatccgttgctagcaccaagagagttaaattctgttaatgaagaagatagtcaacataaacaggaattttccttctactaggtgtttttttattactgaactagattgcatacttttcttctagataaatattatttaagaagtaattccttaggagaaaaatgactctgtaaattgtttccttttcagtccgcctgccactgcccccgaccatacrcagatatacacaagacaggaatttttcttttttttttttgagatggagtctagttctgtctcccaggctggagtgcagcgtcacgatctcagctcactrcaacccccaccttccgggttcgaccgattctcctgtctcagcctcctaagtagctgggattacaggtgcgcactgccacgcccggcaaatttttgtatttttagtagagacagggtttcaacatgttggtcaggctggtctcaaactcctgatctcgtgatccgcctgcctcggcctcccaaagtgctgggattacaggcgtgagccactgcgcccggccaggaatgatttttttccaacacaacagaatttgtagaggcaagttggtggtagggtggctgttgctctaattttactaaaagcaaaagtatctgaaattcttgacagttaatgccctagaaaacagcaaatttcagtaaagaagactctgcttctgtgaacttatttctaaaaagtaaagaagaggtgacacaaacttggggagaaagttatcttgatgcccatcatagaaatgaaagaaatatgtggcattccttacaatcttagaactcttggagtrggggtaggagcttgcattgtagagtcctagctaaacaaggtaacacttattttatatttatagtatgttatgttactgttagtatgagtatgctactgaaccacatacataggaccagttagaccggacttggattattatattcaattgtgtgaatcaaatataagaggggatttttttattcagaggaggaaagtggaatcagagcatccagaatttattgcacaagcatagatacgaaaattagtgctgcttattctagagatgaaagaagactataccatgttatcgtcttcacatatgtggaagaatcacaaagagtgagtggatattacttgtgtggctttgggagtcaaaactaaggccagcaggtggaaggttacaaggggtcagacaacctttaacaatattcagcgatcgaactgtctggaagtatccaagcagtggctggattggcatttttcagagatgttgtagagaggatttcagcctagttcgaccaacaggttataatctcactagtacaagaaagtgggatgattcctccaattgaaggctttagctgctcagctaccaaagatatactagcttttgtgattgccattcatatcttttcccaaaatgataaccattggagacctccaataacctctcagtaacattttcttctttggctgtaggccaacatcatagttacaagagatgcacaaaatttatccaacactcttcacctagaactacagttatagattgttgttttcaggattggtttttgctatgggagataaatcatacatcagcaggaaaccctagtgtcaaataaagatcagtctatttaggaattcatcatctttcttgacttatcaaatctcccaatgtattatcaagactttgagctatacctttgccctcagcgcttgctggatttggaggtagacagttgacttcaataacaagagtttggagtactcctttcagtgtacccccattcagatggtcaaaatttcatcaccgtagaggccatggcgttcttttccaagtttctactaatctggccagacagtatgtctatcccaagttgagatgggcaaagtcctctcccttgtattcttcgttcttaagaagtatatgtgggaaataattttctggatcttagcaaactaaagttaatagtaaatgaggcccgggcacagtgccacaggctataatcccagcactctgggaggcaaaggcaggagtatcacctgarctcaagagttcaagaccagcctgggcaacaatggtgacacctcatctctacaagaaaatagaaaaatgagccgggcatggtggcacagaactgacactctgggaggcaaagacaggagtatcacttgagcttaagagttcaagagcagcctgggcaacatggcgaaaccccatctctacaaaaaaatagaaaaagtagccaggcatggtggtgcaggcctgtagtcctagctacttgggaggctaaggttagaggattacttgagccaaggctgcagtgagccgagattgcgccattgcactctaggctgggcaacagagggaaaccttgtaacacaaaatagtaaatgagaagtttaaaatgacattcctcagaaaaaatgtgtcactgagagtcctggctaaaggttgcttgaaagctgaaggctgtttgattataccttccaatctcccagactacaggagctttgttttgtggcatttgttgacatttttccagaactttgcctttggacaaaaccctgtgtgatagcctacctttagatattgcaagacatcaccatctcatatgggaccaattgtgttatcagtgattaatcccacctttggactatgaaagacaggagggggatagcatttagttaaacttcctaagagtctaagttggtttctctgtaggaacttgactgcctcacagcttttgggaaaccattcagatgaaagcatgtttccagtgtagcagcaaaatgtgatattattaacaatagtcatagttagcaagcagtacctggagttgctgaaactgatggcatctagataagtaataaatttgacaagaggctgcttttctctgttttcacaaatcattaacaccatattctttgtgaggatcctttcctattccagcagagtattagacatgcattaaacaaatgtttgtcaagtcctgctatatgccagacactgaccttgtccctgagtaaactgaaatgaacaggacacaatacctgccattaactgacacatggttaatgtggtcaacaagtatactttacagataggcctgctttgcttcactgtaagtactatatagtagattcatactctgtgtatggtttcatcagaattttcacaagtagaacagtgtttgaagttgagtgctgttccataattacaaaataaactacagtgtgtcctgagcagccatgactaccaactttatttaggcttctggttcctcataaagagatccttagaatrtggagatttacattgactctgatgatatgcctattcatgttctacctggccagtgagaacatgatcagaatataccctgcagagcattttttcttccagaaattggtgcttaacagaagtactttgaactattcttgagaccataacaatagagattttatcaaggattactcctcagtttgggaagtatggttttttgggggttgtgggggtgaggcacagagtttcactcttgtcgcccaggctggagtgcagtggtgcgatcttggctcacttcaacctccacctcccaggttcaagcaattctcctgcctcctgcttcagcctcccgagtagctgggattacaggtatgtaccaccacgcctggctaatttttatatttttagtagaaacagggtttcaccatgttggctatggtggtctcgaattcctgacctcaggtgatccacccacctctgtctcccaaagtgctgggattacaggtgtgagccacagtgcccagccaggaagtatcttcaatctaaagatttcgccaaactccaagcaacttttttttttttttttaaacatagctacctattgactgcctccaaataatttcctttaagtgcccaagatgtggcttcaaacattaaaatctcagactattaatctactgtctcagcatagcagattacattcactcacatattgtagtccttacagtgtgactgtaaaatcatacctctactatcagtcaccagactggtttcagacatcttaatgactagggaatcatgttgatacagacattgacacagaagtctgtgtcttggaatgttggtaactatgtggatataatcactttacccattctacccatatcgatcgcctcagctaaaacttcagtttcagttatgtctttctctttaactctgatttcatgcaaccctcttctctttccagccttattttgacagaaggctactacttgaccttcctttagatcaccaatcctttgggacagatatcttcccagttgacactgtctctcataacagctagttattttactccagctatttctgtgcacatctaactctcctttctgggggagttaacctgtgagtcaccattttgattacttcagatatgcttattactgctgaagaatagtaatccttattctaaaatgcttgggtacatcaaataactttatagaggtagctttacaggtttttctttattttgattctttttctcttactctccaatttaagaagcctttttctaaaagcacttcctgcaggtgggtgctaagtggttgggatagcagaaccatagattagggcaactgtagataacctacttggggaggacagtgtgatcagcaatgcccaggaagtgatcaggaaggaaggctgaagtcagggctaatgacagcaagagctgaccttcccctctgacattttcctacttggcttctgcaatgccattctttctctttttttttttttttttatattttatctaatattttatttactgatctctctgaaacatgccaaaattcatatagctaagggaacttaccatgctaaaatgttgttcaacatgacaaatttatacaaaacatatttcaatgtagtgccttcatttcattcttgaggaatcaacattacatttaggtggtgaaatttaggatacaaatataattatcaaatatcgtacttctagtttactggaaaacataacagttgtgacagtaacacctaacaccttggttaattaaagacagaaaatgggcaggggtgtcacagaagtatgcaaggatttgacagttcaaactaatccatagcccttctgagaaactacagatggaaaatatgtagtaaatatttctgtaatatggtggtttcagtacattatagcacagtgatcatcattccattcatacactcaaataaatgctgcttctgatcactgaaaactagattcaaagtcattgctcaacaagctgatactacaaatcccttatattaacaggtactttaaatgtggaaataaggcaaagcatacttgttagtcacaattacttttagatataattgagactacactgctatacataattaggtacacagtatnnnnnnnnnnnnnnnnnnnnnnnnnnnnnnnnnnnnnnnnnnnnnnnnnnnnnnnnnnnnnnnnnnnnnnnnnnnnnnnnnnnnnnnnnnnnnnnnnnnnnnnnnnnnnnnnnnnnnnccagcatacattttatgctccaaaatacatggatctgacaaaatggttacatttaatgttcttttaaggaaagatgaactaaatttaagaagaattggtttttcctaatatctcattttcaaattactgatacaaatttgccagagaaacaattacatgttttacctaacatcaaataatctccagtttctaagacagatgcatttcttgttcagtttccaaaagtaaataaaggctttctaactgaaaacatttgcatccctagctctctaaagtaaacattaaaaagaaaattacaaaaaatgacctctaagcttctgaacagtccacttagttacataaagtactttctgtcccaacactttctctaattcaaaagatatttacttcctaagtacacgacaaagtcttcatttcaaaccattcactcagtttccatggtaacattgcrggcttccttggctaccataagtcgcattagttgactgtggaatttctcaatcttctttacatcttgagcttgktctgttttatacaccaaacaaactaaatcatctgttactttaacacacaagttmccatcagaatgcctatatttgagaaccacacgtgccttcatagggtcagcgaggtaaagcttctcggcagcgcggctgaactcctcccaggtctggtactgcggcatcgtggcctagagtggaaaagtaaagagaagcaaggcctcagaacycggcccaacaaactacctacgtccgggagtcgccaaccgacgcgagtcctgcaatgccattctttcttagctttacttctcagactccttttcatatactgtgataccttaattcagcaaatgtcaacaaattgctctgtaccatgtactctaaaggatgctggggaagtagtgatgaattaagatgcacatggctcttgtccttcatggaactaagagtctagaaaatgccgggcgcagtggctcatgcctgtaatcccagcacttcgggaggccgaggcgagcggctcacgaggtcaggagatcgagaccatcctggctaacatggtgaaaccccccctttactaaaaatacaaaaaaaattagccaggcgtggtggcgggcacctgtagccccagctactctggaggctgaagcaggagaatggcatgaacccgggaggcagagcttgcagtgagctgagattgggccactgcacttcagcctgggggacagagcgagactctgtctcaaaaaaaaaaaaaaaaagagtctagaaaataaggcagtaattacaaattttaataagtgacaaatactgctatgaacagcaaagacaaaaatccctgttgtatggagcttgcattctagtgaaggaggtgggagatagaccaactaaatggtgtgaagataggaaaaaatgtggatgggcagaagggactattttagatgggatggtcagggatagccttcttaaggaggtgacatttaaacaaaccaggtaatgagtagaagtgaggatgctttgtgcaagggaagagcattccaagcagaagggtggcatgtaccaagtcgctgacatacttgacaaactgaaagtatattatagttgggaaagggaagaatcgtgtgaaatgaaattagagaagaagttgagggccagttcatgaaggagcttttaaggccatagtagagtgtttgaattttattctgagagcatcagtgggaagccaaggaattattttaaacagggctgtgatattattatttttaaaaggtcactagagacaagtggaaatgagagacctatttaggggagacattgcaggagcttatgctggaggtgatagtggttggagtaaggtaatgtcagtggaaatagaagttggaaacgtgttgagtttgagatgcctttaaaatatccagaaggaaatatgttaagcaaacattctggaatttgggtgaaaagtgtagactggagatttaaatctgagggttgtgtatctaggtggtatttaaagccatgggatcagataagattatctaaaaagaggttagagaactgagtcttgaggaatcccaatatttagaaattaggtagaggaagcaataagccctcagtgagatatgacatgtctaaaacttggactcttcatcttctgccacaaacctattttcayctgcagccttgcccccattgctgttgatggcaacttcactcttccattactgaggccaaaaaccttggcagtagtgtgtatagtagtaagattggaaacaacctaactatgtatgagaatggaactagttacattttgatactcccaatcaagaaaatatataaaatactgataggagttgatttctgggatattattaataatagatgttttttaagaaaggaagatgtaaacactatctttaaagatatatattagcagatgtttgcttgcatgtatataaaataacttcaacgtatgtgaaaaaaagtggtaaccagaaggaagggaactgggaagctgggaataggggtgggaggaaggcttcaccagccatgtgagtattacctatggtgttcacatgaaccatgtgggtatactatcctaaccaaatcagtcttaatcttagcccttatcatctgggctgggcgcggtggctcacgcctgtaatcccagcactttgggaggccgaggygggcggatcacaaggtcaggagatcgagaccatcttggctaacacggtgaaaccccgtctctactaaaaatacaaaaaattagctgggcgyggtggcgggcgcctgtagtcccagctactcgggaggctgaggcaggagaatggcgtgaacctgggaggcggagcttgcagtgagccgagattgcgccactgcaatccggcctgggctaaacagcgggactctgtctcaaaaaaaaaaaaaaaaatcttagcccttatcatctgtcacctagactatggcacatagcattctaaaaccttaaggacctatctactgcctgtctctgcatttgattcatttattcacgcaattgccaaggtgatctttctttaaagaaaaaaaaaggcaaatagtcactgccctaaacacatcattctgtaactaatgatgtgttgtagcagtatttttcaaactgtttctaagaggtgctcagggatacaggaatattttcttttgggtctttgtgaggggaagaaggaggattcaaccagaatagtttttattttattcaattaatttgcagttctatgaatgccaactatgtactaggcattgggtatttagcagtaaacatgacctgcacttattataatcttaaataagatctaattgaaatctgactgggcccagtgcggtggcttgtgcctgtaatccccacactttgggaggctgaggattacttgaggtcagaagttcgagaccagcctggccaacatggcaataccccatgtctactaaaaatacaaaaaaattagccaggcatggtggtgcacacctgtagtcccagctactcaggaagctaaggcaggagaatcgcttaagcctgggaggcagaggttgcagtgagccgagatcacgccattgcactccagcctgggtgacagagtgagactctgtctcaaaaaacaaaacaacaacaacaaaaaaaaccctgctatctgaaaacagtttgaaaaacactaatttatgggacaaaggccaggtgctgccttagcctaacatactcctttcattgttgttgttttgttttgttttgtttttttgagacggagtctcactctgtctcccaggctggagtgcagtggcccggtcttggctcagtgcaagctctgcctcccaggttcatgccattctcctgcctcaaccacccaagtagctgggactacaggcacctgccacaacgcccagctaattttttttttttgtatttttagtagagacagggtttcaccatgtcagccaggatggtctcaatctcctgacctcgtgatccacccgcctcggcctcccaaagtgctgggattacaggcatgagccaccgcacccagccagcctgacatactcctgatctagcatctgcccactttggcattctgtgtcctggctgttatggagcatttgtttattcttttcttttttcttttctttctctcttttcttttctttttttttttttttttttttttgagatggagtctcactctgtcacccccaggctggagtgcagtgacgtgatctcggctcactgcaacctatacctgccgggttcaagcaattctgtctcagcttcccatgtagctgggattacaggcacgcgccaccacgcccagctaattttttgtatttttagtagagactgggtttcaccatgctggccaggctggtctcgaactcctgacctcgtgatctgcccacctgggcctcccaaagtgctgggattactggcgtgagccactgcgcccagcccaagcatttattctttcatacctccatgtctgtgtacgttttgtttcttctgcttggactgcaggacccttccttgctcatctcctttccctcacctctccctcctcattttcctaatcatcccttatttttctgtatgctttcagctcaggtgtcatcactggaattgccttaggtaagtcttttccgttctctgctttcccctagtttaggagttcccttctttgagctctagtagcactttatatatacatagcaattatattgtattgaaatttaaaatcttcatatcttaaattatgagctctttgagaggaggaagaatcaaagatacaaagatactcatctttgtgaccacagagcccagcaatgttaaaacaaaacaaaaacagttaatcttttcaactatctttagctcttccatcagctgcaaccaggccaaccccaggcatcgaccttagaaagactgtaccattactttcttatctgttctcattgctggtcatcttggaagaactacagtcagacttggtggctttaagaatagaatggagggctgggcgcagtggctcacgcctgtaatcccagcactttgggagaccaaggcgggtggatcatgaggtcaggagatcgagaccatcctggctaacatggtgaaatcccatctctactaaaaaatacaaaaaattagccaagcatggtggcgggtgcctgtagtcccagctactctggaggctgaggcaggagaatggcatgaacccgggaggcggagcttgcagtgagccgagatcgtgccacgcactccagcctgggcgacagagcgacactccgtctcaaaaaaaaaaaaaaaaagaatagaacggagaaaatttcagaagagtgagcagttcctttctctctacccaaacacattgtagaccactccatctgctttaacatatgcctgaaagccttatcatttcaaagctaggtgtaaaaaggttttaagtactaatatatgggaatgataagagattgaaactcattggtgctagatctgtaaaccagtataaataaattaccagactttttttgttttatttgatttgggggcagttgagcagaactgtggaatgttggtacctaaaggaggcctcctacatggaaagaagttatatatgcgttttgcaagtggcaaagtagggactcctttgaagacactggatttcatacttttgcctggggttatctctctgtgtctcactacatagacaaatattagctgtgagcagatctttttttgttgcttcttgtagtcccccagtttagcagaaacattctgtgagatagatgtgggaaaggaattctagcaagagttttgtcactgtatcataaggttgtgatttacatatttaagttttatactttgaacatctgaaaatgtatacatactaaataygcagaactctattgtagagtgagaaacatttgaactttgagctttcagtcacttattttgtattctttctttgaggttagcagtagtagtaccacccaaggcactgcttaggtaccactgctgcttagtggagagtccctctggctttatcattaaggttagttattgatatatttctgatcacctttccattaattagttcttgaattgttgagtctgttattaattttcaacctgaaacattttagtatggatggtacttatctaatttgatatcttttccttgttgaacttacgtgtggacaatttgttttcatctaggttttgggcggaaagacgtagttgaatatttgcttcagaatggtgcaaatgtccaagcacgtgatgatgggggccttattcctcttcataatgcatgctcttttggtcatgctgaagtagtcaatctccttttgcgacatggtgcagaccccaatgctcgagataattggaattatactcctctccatgaagctgcaattaaaggaaagattgatgtttgcattggtaagactgtttacttttccgacttttactaatgttgtaactattctgaatctgaactgaattaatctgttcatatcatcaaattatgtcaagctgaatttaaatatttaagaacatcccatgatttaatctaactactatttactgagtgtctttttgtgtgtagtactgagcctaaatttctttggagaatggactacaaagtgcctattatacttgcattctcttgggagagaaaatatacaaagagccagataaaggcatggtggaagggaacagagagtgttaagaggataatgagcacagtgacttggcaggatcaagtcaaggccctacttcctggagtctttcygtgagaaagggaaagtctttccagtggggaaagggttaaaaaggtaggtgrggatttctctataaaaagctttaaataccaggttaaggagcttaatattagtacgtgcaggcagtgtagaatatttaatattttttgaggaagggaacactgtgataagagtacatagtatgcagtcatgctccacgtaactccatttcaaaatggatgacatacataagggtggtccataagatgataatggagctgaaaaattcctgtcacctactgactttgtagcagtcctaacttcatagcacgaggcattactcaggtgtttatggtgatgctgggttaacctagtgyactgccagtcatataaacgtatagyatataaaattatgtacactacatgatacttgataataaccaactttgttactggtttatatatttactatactttttattgtgattttagagtatactcagcaattaaaaaaaaaagttaactgtaaaacagcctcaggcaggttctttaggacgtgttccagaagaagacattattataggagatgacagctccctgtatgttattgcccctaaagaccttccagtgggasaagatatggaggtggaagacagtgatattgatgatcttgagcctatgtaggcctagctaatatgtgtgtctatatcttagtttttaacagaaaagttgtaaaaaaaaatttttttgaatagagaaaagcttatagaataaagacataaaatatttttgtatagctgtacatagtgtttgtgttttaagctgttattacaaaagtcaaaaagcctttaaaaatttaaaaatttctaatgtgaaaaggttacagtaagctaaagttaattattgaagaaagaaaaatattttaaaaataaacttacatagctaagtgtgcagtgtttatgtagagtctacagtaatgtattataatatactaggccttcacattcactcatcactcactcactgactcactcagggaaacttccaatcctgcaagctccattcatggtaaatgtcctatacagatataccatttcttatcttttatactatatttagacatacttagttacagatgtacttaccattgtattacagttgcctgcagtattcggtacagtaacatgctgttcaggtttgtagcctaggaggagtaggctataccatgtagcctaggtgtttggtagactgtaccagctaggtttgtgtaagcatactctggtgttggcacaatgacggactcacctaccaatgcatttctcagagtatatccctgtcattaagtgacacatgactgtattttatgaagagtaatctggtaggggactgggtaggatggatggcatcaaggataccagttaggaaactgtaaagtaacccaggtgagaaatgatgctactgaattatagggttataggagagaaatggcaggataagtaagaaaaatatacagtatgtgagaaggctttttgagaatttgtattaacctggtatttacttttgtgagacaaacagattcaaggattttggactcattgccaccttaactccattatttcctgatgtaaaacagggacagttgaaatccttaacagatagaaagccagttcagtgcactagagaaagtccaggtgttctatgctagacttaagttggacctcatggtccccagcatcccaaatcactatttatgtcaacttcaccagcttagttgaaatgaggtcatttataaagatgtgaaatggatttcctagttacctctgcccaattctccttttctgtatgttgtcttaaattgttcctgccctacattcaaatacatcatttttaccacataacccaactctggtacctcagaatcttagacatataattaattagttttaataatgtagagttttccagttataatctgcactatccaatatggtagctaagggcttgcaatgtctgaattgagaggtactctaaggggaaaaagcatgccacatttcagagacttagtacaaaaaaaaatgtaaaatatctaattttatattgattataatataaatgtaaatattgaatttttggatgtattaggtgaaatctgttcaaattaatttgaactgtttctttttttcatgtagttactagaaaatgttaaattatttatgtggctcacattttatttctgttgaacagcactggtatatataggagtagagcagaatggaaattcaccctatcaaagaacaggagctgagcttcctttctgcacatatttgcctgtcttcctccagctccttatttagagagtatactggaatagcttcataataatrcaaataataatacagcacagagcaaaacacaagactttctcttttttttttttttttttgagacggagtcttgcactgtcgcctaggctggagtgcagtggcgtgatctccgctcactgcaagctccgcctcccgggttcacgccattctactgcctcagcctctcgagtagctaggactacaggcgcccgccaccatgcccagctagttttttgtatttttagtagagagggggtttcaccatgttagccaggatggtctcgatctcctgacctcatgatctgcccgcctcggcctcccaaagtgctgagattacaggcgtgagccaccacacccagccaagacttccctttttatgtgccttgaattataatgtagtagttttgatttggggtaggttggccctactaagggtatttggattttaacttaaaattccgtgtaattaacctgaaaaacctaactactcagctagcaacccttatttatatatccctcagttaagatttttccaaagaaaaattgtccttgtaaggagtaatttgcacctcggtttcaatgtacctactccactccttagactctttaccttgcaccttacaagtgcattgtattatggtatcaatagtggacaaatacaagcaggctcctgttaattattcagctttcctgaagaatagaaagataatgactgatgaccttacagaatttattgaaagcataaggaagctattcagttttttgtgttttttaaaaaagaatttacctgtgtgattttctttttttttttttcttaaaaatcctacatatctctgttcccaggctatctatagctttagacattttatttctgtcatgatgaacagtctttctagcataagcagtgttcttttggaatgagaaaacaagcttttaagcacacttgccttttcccttacacactcttatctatccttagtcacttgtcaccagctatataaatagcaaaggaaaatctgcattgaactgagggggaacttatttaatgtgtctttaatgcattaagtaatagaatactttatgtattatttttatatttaaaatgtaacattcccattctgacaagatatgaaaggtctttaaacaactttgagactttgctggaccagacttcttgagaaaatgatttactaaaatcaagttgttaagattaccattgaacttcaaaatagtgttgctattttgcagtgctgttacagcatggagctgagccaaccatccgaaatacagatggaaggacagcattggatttagcagatccatctgccaaagcagtgcttactggtaagtctgtatactctggttattccaggaagcctgtaaagaacaaccttgccaggtaggaaatttgcctcctatgattaatgacttcagctagatttttaaaatagtgtcagttcwgtagctatccttttctacgtctagatagctgacatttkattctcctctaagaaaaataaagctttctttttattttctaattgctgtttaagtatgtcattgttgccttattgggggtgagggtgatagataattgtatgttgctttagtatattcaggacattttttaaatacccctgagtttttcagataacttatgcctgccctttacatgcaggttgagtatttctaacccaaacttcaaaacacttctggtcttaagcatttcagataagggatattcaagctgtactattttttttaatgtattttaattttgatggaatgctttcaaaaaacactggccattccgttaacttttcagaagaggattctaggcacactcatttcagtaccatgctagttgtactctgctgtaacatatttatgtccttggaacctattgctatgcataaggctatagtttagattgacaagctttcctgagttgtatccacttcacatattatctcccttgttartgtgctttcctcttagcaactcagccatgttgtttaccagattcttacctaccttgtgatgactagaatcatacctaatctaaagtcaagagccaaaggggctttgctgtgagctttgtgcctggattttgtgatatttcttctaccattgctgagaaaatttagacttcttcatgrgaagacttcttcatgaaaagacttctagaagtgtgcactgttattgtgactatcaatcagtgttcattttctccttcactagtccatgttattccatgcttttatttttgttttttaaatcttgggcctcaaaagaagcattgccttggcagtcagtatgcagttcacattgtgggtttggatgtcattcagcaaatcatattaatttaaattttgttggttttatagttttgtttgtattcatttgtaaaagtaaagcctttaataaagaaaagaaataaaagagttcatagttaatccttttttatatttgtatatatttaaagtagcattaaataaacatgatattagtgtcaaaaaatctaggttcataaagatgttaatgattatgtttaatcagtgatgctatagattcttttgtcatttctataatgttggtatattgagttttgtttgttttgtttaggagtttgcttttggggtgtgtatgtgtgtgcatgtgtgtgtatcaaggcctcactctgtcgcccaggctggagtgcagtggcacagtcacagcttactgcagcctcaacctatccaggctcaggtgatcctccaacctcagtctcctaagtagctgggattgcaggcgtgcctcaccacacccagccaatttttgtattttttgtagagagagggtttcaccatgttccccaggctagtctctaactcttgggctcaagcgatccacccacctcagcctcccaaagtgctgggattacagacatgagccaatacacccggacatttttaggtttggaacaaagttgtagatacattttgtttctctgttataaaaataacatactcattttaggaaatttgaagggaaaaagggaaaggtcaccaataacctatgacscaagataaactttgttaatattttggtatattttcttttgggctttccttttcctgagcatattgattttatatagttgaggttgcctttcattatataaaatagaatctttttttttaatcccatagcaaaggtatttcatgtttgctcttcatgcaaatatttttaaactacacaatattctgttaatgaactattttccatttattggaaatttgtttccaaatttatctactttataattcattgggcatctttttgcataaaactcattaatttttctttttaatttctatacttttttttttttctaattcacaggtgaatataagaaagatgaactcttagaaagtgccaggtacgtactaatgttataaatatgtgacaggaatacttcaccattaactttttctttttttttttttttacagtaagcaaactttaaaaagaatttttttttaatggttacagtacttatcttgaggaacatctgatgaagaatgcaaattactaatactttttttgtattctaggagtggcaatgaagaaaaaatgatggctctactcacaccattaaatgtcaactgccacgcaagtgatggcagaaaggtacttccttttgcaactgagtttgtgcttatctcctggtaacatgaagataaagatgtgtttatcttatgataaattgaaacatatttgaagagagtgctgatgttttaagtgtttcagtattttcagtatttcaaattcttaagcctagtaaaactttattgatgataaacagttatttgcttcctatatgcaatagtgaatttataaacttgtatactatgccttcaatatgtatgttggattttgtaaaaccaaattgataactacttagcgaagttataattggattttctggttttatatttgggttttttccctctcacacattttattcaaccattatttgaatttcattaatatatttgattaatatttcagtcaactccattacatttggcagcaggatataacagagtaaagattgtacagctgttactgcaacatggagctgatgtccatgctaaagataaagggtaagcatttgaacaaaaacaaggactttttaaatgttaccctcttcttaaaacaatctttgtaaccttagaaaaataatattttttactaaataacattaatatatattgagcttttacaatgtacaggttgctctgagggcgcaggaaattataaaaccttaagcccacagctcatagaaggtttacattacacttcagagggcatgaaaagatacctaagaatacaatgaggtctctaccaagtgttgagtcatagagagggatagcactgcaggagttcccaggaaggaactctcagtgatggttgactggagtggttgggaaatccctcagaatgaggtgtgacttgacctggactgtaaagtcaagtctcaattcaagaaagcagagtttgcgggacattagtctgtaagacaattgggataagtgggggctgctacagcaaacgttaaagcacatttaaaaaacagtgactagactagctttgctggagcagatgattcacacaggagacaaatgaagtttaggattagagaaataggtaagaaccaggttttggaggactgggtatttagcctaagtaattcaaagttcaccctgtgatctgaaacaaaggggatgattattctaaaagaagttttaggaggtgcgtttgaaagcaatgtgttggctaaattggagagagaggagactagaagcaaaagcagcaattaggaaagtgagcattctagaggtttaagcataatcaggatccataataatggtggcagaagaaatgaaaatgaaggcatagatgcaagagatattgcagtgtaagaatgggtaagatttgttgaatggatacaatgagcgaggaataaaaggaaaactacatttcaagttctgaatgagttagatccagtgatacacatacgaaatacaggaggcaaaattgtttggagggaaaatgttgaattgacttctagaactcttagtttttttatttgtttgttgtattttttattttattttattttttttagacggagtcttgctctgtcgcccaggctggagtgcagtggcgcgatcgtggttcactgcaacctccacctcccgggttcaagtgattctcctgcctcaggcttctgagtagctgggattacaggtgcacaccaccacgcctggctaattttcatatttttagtagagacaaggttttgccgtgttggccaggctcaaactcctgacctcaggtgatcacctggctcggcctcccaaagtgctcagattacaggcatgagccaccacgcctggcctagaactctcagtttaatggggtgatacaggaacatagtggtagcatctagtaggtagttaggaacaaaattggtgctcaggcaagtgaagaatcatatattcaaaaatagtaaggaaagccatgaacctttaaagagaggactcatagaactaaagactaaatcacaggtgaccatcccttaccagagtttggcatgatggtggctatggcagcatattagtgagtgatcccaaacgagaaggaaaagcttcaagatagaagtcaagattttaaagtttcaccgtatcttcccatagagaaagttcttcctccattcccatcatggaagaattgggtttcagcttattaaggatctcaaaaaagttttaaaaatgagccagtatttgagctaagtctggaaaagacatgtagaaatgagccagaacaaaggagggagggaaatctatacccagggaacagtatgtgtagaggcatacagggaattataagtttaatataccattattgaagggtaagcctagagagggagccagataattgcgtgtgccacgttaataagttggaaccatctcttgaaagcacagagttaatggtgaaacttaccttttagaaaaatctgccttttagacttaccttttagaaaaatctgcctcagcttggagcataaagtggggtgggagctatttcaataatgcaggggagaaataacatagacccaaactaaggcagtggcagtagcagtgaagtataaaggaacatggatttgaaagagacttgggagttcaaattcttaggacttagggttcaaatggatgttactaaattttgaacatttttattagaacatcacataatccatttgctatttaagtataagtaattaaataaattttaatttataaatttccctaggcctaagaaatctatactgaaacaggattttcccccccttctcattgtagtgatctggtaccattacacaatgcctgttcttatggtcattatgaagtaactgaacttttggtcaaggttagtgctcttgtactctcctaattactttctagagttatataaaataacttgaaatacattagtatgtctgggtttctttttattttctgtgttcttagtgcttaaaaaagtagaagtatttataagcattataaaatataggtgactgatagctcagcatttgactgctttgagatttttgagataccatatgttttgttttgttttgttttgtttttttgagacaaggtctcactcttgcccaggccggagtgcagtggtgcaatcttggctcactgcaccctccacctccagggttcaaaggattctcctgccacagcctcctgagtagatgggatttcagacaggcgccatcacgcccagctaagttttgttagagatggagtttcaccatgttggccaggctggtcttgaactcctgacctcaagtgatccacctgcctcggcctcccaaagtgctgggattacagccatgagccaccatgcccagcctggataccatatgtttttaaatataaagtagcactgtcatcttgctacacatcatcttgtgacgcatcatctgaaatcccatctactcaggaggctgtggcaggagaatcgtttgaaccctggagatggaggttacagtgagccaagattgcaccactgcactccagcgcaggcaagagtgagaccttgtctcaaaaaaaaaaaaaataatgtagaatagcagataaagtgattccataatttatagctaaaggtgaagtttcaaaactctaagaagcagtttttagtgaatcatattttgttaaaaccaccagatataatagcaagatttgccagttgtacttcgagttggagctggccgatttggtaaggttcacttcttccagtatgctcaacagctgtttaacaaacaggttcccaagactagcaagaaactttttttgttgttttttcggttttttggtgttttttttttttttttgagacggagtcttgctttgtctcccagcctggagtgcagtggcacaatctcagctcactgcaacctctgcctcctgggttcaagcgattctcctgcctcagcctcccaagtacctgggattacaggtatgtgccaccatgcccagctaattttctatttttagtagatacagagtttcaccatgttggccaggctggtcttgaactccagacctcaagtgatctgcctgcctcagcctcccaaagtgctgagattaacagacgtgagccaccacacccagtccaaaacttcccattttgatcccttttagatgagagtagaagatatatattatctttggaagtggatcccaggatgttacctataccttttaacttctgttaccctgcacccattctactccttcagcacttttccccactttcagcagctgttacgggaagagaaagaggacacttgtttccagtgcctctttggttcctttcgggcctgagtcttatgaaatacgttttcccatagaaacaactttataataataattagatactctgagtagcatattaaacttataatgtggctgtaatgttatacatttgtaacagtaatgcttttgcttcttgtaaaactgaatcttgactccagcagaacatttgaaagttgctatggataagaatgaaacatcaaacagattgcacttggacttaaagacaactgagtggtaytttcctaagacctagtattttactaaataagaatgaaaggctgactagaggtcatacctacagagggagttagctaatgtgagggtgtaagtagttaccaggatagtraagttaagcaaagtcaggagaaagcaagtagatagggattgagaatgcagattctgagcagtgctgagtcaattggcaacacttgcctaaatagtttggctaccagaagctggcatttaacagcaaacacccagtgactgctttccatgaccagggcatttgctagccatggaaggcactaagacacgatccctggacaaagcattcaaataatgaaggtctggctctaacaggcacaagaataacagggaattctcttaacattcttcctcataatctctgaatactaggaagcaagtagacagatctggctagaatggagggaaaaattatgtcagatagattcataattaattgaaccactgtgcagagtgttgactgatatttctttgcttggaagggactgttggaacctccagtagggcctgaagtttctatctttatctttattgtggtgcacacttctatggttgacttgataaaaaattagaaggaatgcttatccagtttgcagattaacatgaagctgggaaggataactaatattcaagttgatagaatcaaggctcaaaaccatctcaccaggctctaagctytgggtgaagccagtaagattaatggggctcagcaaggacacttaagttcacgaaataagtcgcacaagaaaaagatgggagaggagaaaatactttggtgtttacttcttgtttaaacaataatacagagtttttaaatgacccattaactcaattttaagtataaattataatgtgacaacttaagctgtcataattttgggccaatagtagaatagtattgcaagcaatataatcatggatgcactgtactctgcacacccaaaccacactggaatctgtgattttaggctctcggtttggtttggtttggtttggttttttttgttttgttttgttttggtcgaggggagagggtctcactctgccacccaggttggagtgcagtggcacaatcatggctcattgcagccgcaaccttcccgggctcaggtgatcctcccacctcagcctcccaagtagctaaaattacaggtgtggtgccaccacacatgttaatctttttattttttgtagagatagggtttcaccatgttgcccagtttggtcttgaactcctaagctcaagcgatccacccacctcagcctcccaaagtgctggaattataggcataagccactgcctctggcctcaattattttttaatgaattttttaaactaaagtatatttagttgagggccaccatgataataagtggaaaccatctgatatgaaagatgagtgccctttatgatgtcttttgctccaaaggcaaatagatgaaagttaaaagtgcatattttaacttaatatagaagaaagctttgtaacaacagaagttctctagtaattataaaaagccatgttactgcaaattagctccccattgtcaaaaatactgaaagagtaagaagctggttcaccttagttgaatgctgtagaaggaaatttgtgtttgattggttaaactagtttgacttcagtggwccatacttagccaactccagtacttggaaatggctaaaattaaaaagcctaacaatacaaagtgttagcaaggatatgtagcaactggaactcaaacgttgccacgtagcagtggaactcaaatgttgctggtggctggctgcataaagtgygatagccacattagaagactctttgacattttctaataaagttaaacatatatctaccatgacagcatatgtgcataaagaaatgtttatgatagctgatttgtaacacaggttgagtatccattatctgaaatgcttgggaccagaagtgttttagatttcagatattttttggatttgagaatatttgcatatatactacataatgagaaatcttgaggatggaacccaagtctgcacatgaaattcacttacgtttcatatacaccttatacacatagcctgaagataattttatataacatttttaataattttgtgcacgaattaagtttgtgtgcataaggttaggtgtggaattttccacttgtgtcgtcatgtcggtattcaaaagttttggattttggagtattttgcatttcaggttttcagatgagagatactcaaccagccaactagaaacagtccaaatctgcattaacaggatgataaataagcaaattatgatatatgtatactgtgaaatactcctcaacaatgaaaatgaactacttgtgcaacaacatgaatgaatctcagcaacattatatgtatgaaagaatctagacgaagtacatacgttagaaatttatattcttctatttttatgaaattgaagaacagatatatctaatatgtggccagaatcggggcaggaattgtctataaaaggagcatgaggaaacattctggggtaatgaaagtgtcttgtatcttgatttgggtgatggtatcacagatatatacatttgtcagaattcatcaaagttgtatgtttcactgtatgtcagctataccrcaagaggagcattcattcttggaagagatgcaggttaaatctaaagcttcgttcttaactgttcttaaaagtagaaaagttaagtagacccttgttggtagggctagcaatcagctactgttttttccattgggaaaaatgtatactcattctgaaataattggctcaaaaagtgaactttgggaacataacctgttttagcctgtatgatgttaaattacacagtaygaataattctgaattcttttaaaaattgaacattaaatatatgctttttgctctccagcatggtgcctgtgtaaatgcaatggacttgtggcaattcactcctcttcatgaggcagcttctaagaacagggttgaagtatgttctcttctcttaagttatggtgcagacccaacactgctcaattgtcacaataaaagtgctatagacttggctcccacaccacagttaaaagaaagattagcatgtgagtataaaattatgaatgttcaggtaggatattatatcaataaactgaacattttttctttcctgtttgtttttagaaatgtttaaataatagaatatttttcttagccatgggcatccactgttgtttagcatatttaataatttggaagtttctacttaagatgctatgaaaagaaaatatgtttgtattaattttttcaagtcaagttatatgctttttatatgtgctgtattagacttattagatggtatgcctttgaaatgaaagcatttgttttgctttcatctttgatatgatttttctgtttaatctatgaagcttatgaatttgtgaagttaaagcttcataagattgccatcttgtaaacagtctccagatcttaacatctgatattgttggcacctgggccaagttcggttttctgtctatagctgaagtagatgtagtgagaaataaccacctagtttggatatggtattagtgcatacaagtaagcaacttatattggatttatattatcctggaataataaagaatgattggtagttccacaagtctgatgagtaaaagagaatcttaaggaaaacctcttttattttttcatcatcataggtggcttttgcaaatatccaacttgtctagttcccagttccctgatggtttgagcaaagctgtctgctatagccatgatgtcagtgtagagatcactatttctttacagagaaaaatttttgtgcttgaaatattctaaaacctctccagtctaggaagatattgtagtactccagatatcccaaaatgaattacgaattaaaacagaccatgaatctgccgtgggctaaacctgtgtatactcttgaggccatatgtctatacagttgcaccgtaacttaggggaactggagtaccactgtctgttttcaggggttaaatttggagaatatctttagagcctcaatctggctattttggaagattattttgaaaataatttcaaggaaaatactagatgtcttttagataaggcttttcaatttgaactcgttatacatgtaaatgctttttcttcatctagatgaatttaaaggccactcgttgctgcaagctgcacgagaagctgatgttactcgaatcaaaaaacatctctctctggaaatggtgaatttcaagcatcctcaaacacatgaaacagcattggtaatgtttcagatttaagtttttaaaatacaataacsaagaacrtgctaaactaatcataatatcctacttttagaactagcatttttttgagtctatagttttaaaaaattactgcctatgcaaatattttttaaaaatttaaacagtaccaaaaaatagacaacctcaccctgcagaagccaatgctattatcagttcgagaatcctcagaaaaaaaaaattattcatattctgacatgtattatatgtaatgcttttattatcataagtgatacatatagtttgcctttttaggggttataaaaatgaatgcttaggttagaaaatttggaacccaatgaaaataatgaaaaataaaataaataccaccatccagatgaaaacacttggtgtagtcccttccttcttcaaaattagatctagaatgtgaataaagtattttagaggttacttccctgataggggtaataataactgtggaactatgacaaagtagatgtgagtagagaagtctaasgaaaaacagaaaagaatggaagctaatagggatacatgataaaagataagagagggaatggtaaaatcaggggctaccttaaaattgaaaggtagaaaaaaagaaacttaaaggtagaaatttaaaaggaagaaagtaaatcctgttgcgtgagttgcagaatgtgcttcaggtgagagaagataagtaagttaatgtgtgtagaagcagatttaactgatggtagccttacttacctaatatcttttatgagaagttttttgccttatgccataatgtaaactatgaaatttatgtagaaacctacctataaagcattttggacctttttactgcttgtaagaaacttctaaatttaaaaaaaaaaaatagcaaagctgtagactaataagaaatgctagtacaaaattaaaaccacaacagcattaaaactgtacaaagaaacatggaaagactgacatggaaaattctggtcataactactgtgaagcaactcgtttttgtaattaaccttaaaacacactaggagttgtgttggtgagtagttatggtgcagtagcagtttcttacaggttcccagagatttacaggccctgctccaagatggtgcagaggagtagggtgtaatttgaggtggatgtgattttwaaaaaaagtctttaaaaaaccatgtctggtctctgcgctctcatgataggtgtcctgggatgattacccttaacctaccaaaggaactatgttctccaattagaattggttttatttagagtaaaggaatgattttggtgacagcaacatcaaagaatggatctgcagcaaagtcatgaggatctgataagctttatgattgattaacaacaggttaaaatcaaagaacagatttcatgtgtactgtgtttttagatgtatagagcaacttagctgaaaaattacccagaacttttattctataggttttcaggtttcagttttaatttaacatatatacattgatttagtcatgtatcattcagacattattgaacacctattgtgcagatattaggcttaggcttataactggcaaatctctacttcctgtctcctttcctcctggatacatcatagatagagatgctgcagcctgaaactccagattatatcattttccaccactgattttgcagaggtaatgcatgctccttattctgccgaagcaactagttgagagagatataaatactgctcagctgatcagctgtatcagtgctattaccaaacagaatccagagctgatgagtgttctgttatttccctttttttgttttttgagatggagtcttgctctgtcgcccacgctagagtgcagtggcatgatctcagctcactgcaacctccacctcccaggttcaagtgattctcctgtctcagcctcccgagtagctgggattacaggcacgtgccaccacgactggctaatttttgtatttttattagagagggggtttcaccatgttggccaggctggtcttgaactcctgacctcaggtgacccgcctgcctcggcctcccaaagtgctgggattacaggcctgagccactgtgcccggctatattctgttatttcttcatgtaaagaaacctcaacctttgcaagggtgttttcttaacctttaaaatattgcatgaacacaatgctacttggaaacagttttgaaaaggatattggtcacattaaggttttcatcacaccagtgctagctttttcaaagatacaggacaactgtaaagtttgattggaatatgtaataatagatattatctgataggtaggattttcaggttctgtcagaatttggtaattgttgtaattcaatcaaaagtcaagagcaaagttgcgtcaaaagtaaaacaaaaagattaaataactacttgattgttcttgattggaaacacgaatgttcttaaaatcagttatgtatagtccttgattaatgctgcaatttaaattatttagcattgtgctgctgcatctccatatcccaaaagaaagcaaatatgtgaactgttgctaagaaaaggagcaaacatcaatgaaaagactaaagagtaagtatacatttaatgattaaatatcattgagattttactcttttggaaaatatattcactgtctggctgattttttctctctaagattcttgactcctctgcacgtggcatctgagaaagctcataatgatgttgttgaagtagtggtgaaacatgaagcaaaggtatacttcctttttggtaatctttggtaatccaatgagttattttttatttagcaggtgaaatgcctgacttcctaaactatttactttctcataagtattacttttttttccttataatctatgcttaagaattgtcctgcaggtaaccttttctatatctaatttttgctagaacatctatgggtttattcagatacacattcctgtatgtcctccctcctccattccttttaaccacagcccacaggttaaagttattcttaaggacttttctgacctatcatcttttctaatcgtcttttctcacccatatcttctaattcttggttgtcatgataacttctgttatttaccccaaccaccgtttttgtttctgttttaccctcttatttctgtaactaagccaaaggacttgaacggaaggaaatatattatttaaataatttgactaaaaacataatagctccccatgttggtaagttactgttctttagttggcatttgtgcacaaagcattttattcaccaaatatgctttcatcaaggctagaaatcatctcttacccagaaacttttaaaagtactactcagtaaaagatatacatagcatctcagattggaagagatgacagtagtcacctaattcagcagtttttacagtttttagccacagatccttgcctccttcaaacaaaatctttagttgaaattcagtatactctataacagagaaagaatagatgtgctgtagatgaagggagaggaatagacgctcttctccttggatggcccctgaaacgcttccataaatgaaatttgcagaatagtttattcttacctrtcctttcttgagtttccattcattcaaggaacgatttagagttctccaatttctttttgtgttgcctctctgtgtcttaatttctctttgatttgggggaattcttgataatgtataatcttgatctttcctattgtaaattattgaataaaataaagtttatttctgcttgactgcttggcatatcttgtctctctgttctatatctgtttgttgattgctgttttcatacttgtggtacattacttgaagaatatctggatacatattgaattagagttgtgacactcaatgaaacaatcttgactagggtgaccaaccattcagttttgtccaggacttcacgttttttgggaacacaggactttcagtgctaaaaccaggaaagtcctaggcaaaccagaacaagtggtcaccctaatcctaacacaaagtggtacccaaatagtttttttttttttaagtgggtatttttcacatttcagcgagttagggtatgtgaataaatagtttgattgtcctaagcattttaaatccatttttcaggccctgtaagcatggagactagctattcatactctagttttaggttcattgaggtcttgattatattcacattcacatattatccgattccatgaatatgaattggtcagtgtctcaaaacacactagtgtccrcaggattgattactgaggaacttaatttcttagctatgttgaataattatttccatagcagggaggtagggataacgttggtggagtcttacaggtgattttttttttattgtgaaaaatttcaaagatataaccaagtagaaagaaytttgcagaaaatacctgcctaccacttagatactattactaacattttactctagtgttttattacatatctttccattttttcctccatccaccaatatatcttattttttcacacatttcaaagtaatctgcagactattcctcctaaatacttccacatgcacatcaactagagtttaatctttgtttacagtttttctttagatgtaaaatgtgcagtgaaatgcagagatcttaaatggatatttgctgaattttgactagtatatacacctatgtaaccaaaactcctgtagagatatagaacattatctcatggcagaagtagtgcacagtcccaggccgtctccactttgacagataaccattttattttttctgacataaaagtgcgttctaggccttgacatacatggaatcatacaaaatgtacgcttttgtgtaaggcttttcccacattgtataatgttttagagattcatccatgtatcagtagtttgttcctttttattgctgagtattccactatgtgactattccatagtatgtgtatctatatattttaggtaataaataagggagaagattaagcctatagaaataagcattttaatgctaatttatctctggctttgttactattgtctatctcggggttaagctttacatttctacactttagagatccataaaaatagatgagttcaactttcttaggcagtgtctagctctaaatatctgtgaatgctttaatgataaacacaattactattcagcatctcgcatttaacccaaaattgagtcttccttctgatggtagccttcatgacttggtaaatttattctctagatttgagcaaaaatacttgctttggcattggataataggcctcataaaagaattgagacttaaaaktagtaaaaagtgttaaatacatgattgtatggttttaaattttgcattgcgggctaatttcaattttttctgctttgttaaggttaatgctctggataatcttggtcagacttctctacacagagctgcatattgtggtcatctacaaacctgccgcctactcctgagctatgggtgtgatcctaacattatatcccttcagggctttactgctttacagatgggaaatgaaaatgtacagcaactcctccaaggtattacatgcttcaatgaaattgatttttttaaattaacctttaaaaatttttcacatatcaggtattataggtaggagttggtaataagaaaaattgagaatttttgtttatttcttcttaggttattatacttttaatcagctgaatatcctcagttcccaaatgtcattaagtgataattatgatttttgttccagtagcattttctgcccagtttcttaagttaaatagatggctttcaagtttttatcgagaaagttttgagagtaagataaaatggttgctatttatttttaaagaaaggaatttttagatcctacatattcaaggcaggtagaatttgtataaggtagccaactatttggcttattgaaacatttagcaactgaatacactcatattcattacgtcttaaaagatttagatcaaatatctacacacttggcatagatgaaacatctcagcccagatatctggtcccataaattttaaagtatttttgtctacatctctacttttattagaatttgatgcagtagctttgacatctgaaagctcagatgagaaaaatgtaatagattaagcttttctgtctttaacagtaaatccttgatgatctttatgcctttgttctgggaaccacgttttgagaaacactgcttgaacagatgaaagcagattgatacaacctcctggaatctaccaaaactgtgaacttacaagactgttttgaagatccccattacttcccccatacatcacacattcatttcattgtcagtttttgggataataacactggtcctattcagttggctagtgatagaatgtaaagtcttgtcagttttatgctaagtaccattacatatagctttttacttgcctttccaactagtttcttacaataaattattgaagtggaatttccaggtcaaagggtagcatataattgtcaaattatcttctgttaatagaaagctggtatttagcattttacagtcagaatatatgaaagcacctgttttctgtcagcactagatgttacaattcttaatawtttccttgagtgaatatgcrtgtgtgaattacagaagtaatagattttaatgctaactataaaagtctcatcagtgtagctctccatttcctctctgcctactagcagatggaaaaaaaatgatatttaatctgcatttctgattatgagtaagtttgaacataattttaatgtgtttattgcccatttctcttttttttctttttttttttctttttttttccaagcagggtctcgcactgtcgcccgggctggagtgcaatggtgcratctcagctcactgcaacctctgcctcctgggttcacatggttctcctgcctcagcctcccaagtagctgggattacaggtgcacaccaccacacccggctaactttctgtatttttagtagagacagagtttcactatgttggccagactggtctcaaactcctgaccttgtgatccccctgccttggcctcccaaagtgctgggattacaggcatgagccaccatgcccggcctttctttttttttttttttttttttaatttttcttttattttatttatttatttttgagatggagtttcactcttgtcacccaggctggagtacagtgctgcgatcttggctcactgcaacctctgcctcccaggttcaagtgattctcgtgcctcaccctcctgagtagctgagagtgcgcctaacttttgtatttttagtagttacggggttttaccatgttgccgagtctggtctccaactcctgacctcaagtaatctgtctgcctcggcctcccaaagtgctgggattacaggcatgagccaccacgcccagccaaccatgtctcttttttgtatgtgtgaatttcttgttcatgtctttagctcatttgttgaagtgtttcaaagtactcctttcataagaataccgtgtgtgtgtgtgtgtgtgtgtgtgtgtgtgtaatttttttttttttttttttttttttgagacgaagtttcactctygttgcccaggctagggtgcaatggcgttatcttggctcactgtagcctcaaatatattctcttaaaagatgcatgttacagtttggttttttcccattttgttcttgtttaatgctgttattacctgacatatttttccaaatgccaattttctttttttgatgctgcttttgatgtactgttcaaagaagcttttttattccatgttatgaaaatattcccccgttttcttctagtatttttagggtttaatttttcatacttacatctttaatccatctggagtttactttgttctaaggtgcaaggtagatgttttccttttctgacactttaaatgagctgtaaacttagaatttcagacctggaaatgatgttacatttctactagtctaccttatgtctttagaactgaaaaaatctgagaaccaggaagttccagtgacttgttccagttcagatagctaattaatgacagaaccacagttagatttctgtttgctctcttaatttaatacttttgcamcattccaatggcttgcttatagagcaggccatctttagtcatctcctttatgttcctttatattgcttacatcacattttataatcattatacacatttacatattttgcttatatgtgttgtatttcaaagagttttaagagaatcttatttttcactccccaaccctcaccccccttactaccatggagatctcgtacataatctaccaaattgtaaaagaactttgctttctgatgagatgccttccataaagcttggttccatcttccaaatagaggttagtcactcttctctctctctctcttttttagagggtatctcattaggtaattcagaggcagacagacaattgctggaagctgcaaaggctggagatgtcgaaactgtaaaagtaagatacagtgttacgtttctgttaactttgggtttttattttgacattgttatttaatctgtactgttacaatgaagagcctggtttatttgtatgggccttgccttaaaaggtcaataatacaatcttaattgttctctacaaatgagtagctttaagtaatgaaagagaaagacttcactttcacctgcatcccagtgaatattacattcacaaatataaataaattcgggtaataccaaatgggttttgcttgaagaacctattcatttgtccctttaacagaataaagtttatcaaattattttatattactgtttacgtatgacacataaaacaagaaaggggaaaaacagtgtatcacttctgtctatagatttcttctgatttcttcatttcttcrccccatctacctctagggatccagggcttagtataataataaatacaatgttgccacttctctttcccagggcttgcaacttcaggtcttacctgtttctccgacaagagtcttccccagagtaacccttcttactgttttgactcttgctgtagaaatatgtwygtaaaactgggcccagtggctcacrcctgtcggtaatcccagcacttcgtgaggctgaggcgggtggatcacctgaggttaggagtttcagaccagcctggccaacatggcgaaaccccgtctctactaaagacacaaaaattagctgggcgtagtgggatgcacctgtaatcccaggtacttgggaggctgagacagtatagacatctcagataacttcagatttgttttctaaattcatttctcacagaaaaatgcaactatcatgcagttttattatttgacatgtttttattttgatcctcattattctcattcccttaagtaggaggctaataggatatcgaaaggaggattttgtttctattactactgacttgtggaaatacaaattacttcagttaaaaggttgtgaactgatttttttttcaggaaacatgaaaattgagttgaaagcaattagctgatttttttttttttttttttttttttttgctgtttgtgggaagggagagatacagaattgtaaatgctcattctcttacatatattaaagaacataaaactatatttagtaaacatgttaaagactaaactttgtttttataaagatagagggagtccagaggaggggatagataaagaggagatgaagttggggggcaggaaatggacttagggaacacagtaatgccattggattcaggaaaacctgtgctaggcatcaggctttcttccctcccctctgcttttaaaatcacttgatggacatttatctccatcagccattcttcttatctacctccagacagatggctctgtaygaawcactgggacaagaacatctgcgtattacctaatgaacacttaactattgtgctcagttgtgtttgttcactgataatccaccaggctggatactttattcgacacatgctattagaaaacctatctcagagtggacaaaattaaactgacaggtaaagagtagaatggcctgtgataactaccaaaccaagcagcacctggtacacgtgttaaaaatagtcatttctaggaacctgacttgagacccactgaaataccatctcttgaatggggccctgaatctgtatatctagccagatcttatttgggaagcacagaagagctttttaccaggacaatgattaaaccccttgaggtaaacccactgatagtaggctcctttattttattgagcttaggttatccctgttttgggagtaggttagtaaaaagggggaaagagtttttactaatatggatatattctttttgtttgtttgtttgtttgagatggagtttcactcttgttgcccaggctggagtgcaattgcacgatctcggctcacagcaacctccacctcccgggttcaagcaattctctttcctcagcctcccgagtagctggcattacaggcgcccgccaccacgcccagataattttttgtatttttagtagagacggtttcaccatgttggccaggctggtctcgaactcctgacctcaggtgatccacccgcctggcctcccaacgtgctgggattacaggcgtgagccaccgtgcccggcctaagatagrtatattcttttgactctttaagcactctgatttattatctatgttgcttttcttccccaaactttcatacttttcataactacacttcctcctctgaaccaaagagcacagaaaattgactgttttcttaattctccccaggactgtataaaccatcagcatttttttttccttttttcttttttggagatggagtctgggttggtcacccacrctggagtgtgatggcacgatctcaactcactgcaacgtctgcctcccaggttcaagcgattctcctgcttgaccctcccaagtagtagagacagggttttgccatgttggccaggatggtctcaaactcctgacctcaagtgatctgcccgcctcagcctcccaaagtgctgtgattacaggcatgagccaccacgttcagcctaaccatcagcattctattagttatttcattccacatggagtggtatggttactgaaccaccagcatcagcatcacccaagaacttgttagaagtggagatttttaggctccacaccagttacactgaaaatttgagggttggacccaatgcacattaaagtttgagaaccactgctctaaaggagtacttttcaaactttaatgtgtttccatattacctagggatcttgttaaagggcaaattctgactcagtagatagagatctgagattctgaattcttaataagctccttggtaatgctggtactaccgtaatctcatgtacctctatgtatatttgccacaaaatgcaagttacacttgctgatgattggcacttagtttacctgtatatatatatagtagcggtaatgataaaatttacccttgagcgttagaaaaagtagaatataaaggcatacgtgagaccaggcacggtggctcacacttgtaatcctagcatttggaaggccaaggtgggaggatcccttgaggccaggagttcaagaccatcctggccaacatggtgaaaccccgcctctactaaaaatataaaaattagccaggtgtcctggcatgtgcctgtagtccctgctgctcgggaggctgaggcaggagaattgcttgaacccaggaaacagaggttgcagtgaactgagattgcgccactgcaccccagcctgggtaagagagctagactctgtctcaaaaaaataataagacaaaaaaaaagggcatggatgagaggaccagagggattcccagtaaatgacaaggtgaaataagaatactaaatagtttctgagaatactgatttaatgagacaagaaaataagtcagacactttgaaaattcctactaaatgacttgaaacaagaaataacaatatgtagatgtagtatcatgtatgttgtgttttgtccttcagaaactgtgtactgttcagagtgtcaactgcagagacattgaagggcgtcagtctacaccacttcattttgcagctgggtataacagagtgtccgtggtggaatatctgctacagcatggagctgatgtgcatgctaaagataaagggtaaatgccaatgattgttatggactctcttccttacttttacttgacctttttaggaaaacctggaaatataatatgttttatttttcaagaaagcctgtttcctaacattggcctaaatattaaatagagcttcttaatttcaattaagattttatatggttagcattcatataaagactttattggcataatgcctgagaattttataatggccaaggagattataacattagtgtgatattgacttttaatgtagtaaatttttcagtttccatggagggttttttaattcttccagtttatcttgaagttattttttattaaaaatatacaattctagacgttgcatatatggatgaatgttatagtctctgcatttaaaacattttttaaatgttctcccctgactcaccaaaaagaacttatttctgccttaaatagatttaggttctacaaagtataatcagtataattccttatgtagttcaagaattatctttcatcagttatatgtaattatttaaattaaaacatgttcttctgtggcattattgttcatttattacttttcagaggccttgtacctttgcacaatgcatgttcttatggacattatgaagttgcagaacttcttgttaaacatggagcagtagttaatgtagctgatttatggaaatttacacctttacatgaagcagcagcaaaaggaaaatatgaaatttgcaaacttctgctccaggtatatttaaatacttaactgtaaagagtatgaattacatagcatatgtttatggttttctaaataattctagtataaasttaaactagtaagcaatgggaagcaatgttacctaattctgtacctagattttagaataaatataataaacattttatattttaatccacaagtatgtttactagcacctagagttatttttgtctagagccaactatcatgtgatagttctcttattatttttagtttttctctttggtacttttatattcatcaaatataaaaatatttgatgaattatttacttacaagccagatttatttagcattgataaaatggatgatactggttcagtacagataccagtggatattttacaataacaagaatacagagatttatactttatttaaatgttcatgaaaagtaaaaatagtataacatgaaagttaatttttaatraaatatgactttattttgaatgtagtttaaaattttgactacattaatgcattaaaaaatccagtaatatttaactgcctctgtattctttttataataattctttgtataaacattagtaacagtgatgttaaccttcaaagtagagtctcaatataaatttagtttttctttggtatagttaacactgactattttctcattgaccaaaggcacatttaagccatttccccctttttttctgtttttcacatgcctagcatggtgcagaccctacaaaaaaaaacagggatggaaatactcctttggatcttgttaaagatggagatacagatattcaagatctgcttaggggagatgcagctttgctagatgctgccaagaagggttgtttagccagagtgaagaagttgtcttctcctgataatgtaaattgccgcgatacccaaggcagacattcaacacctttacatttagcaggtaagtgaatgaagtttcacagatttaggctggtaatatctgagattcattttacccaggtaaaatattttctgtaactaaactttaaaaattcaaatcaggccaagcatggtggctcacacttgtaatcccaacactttatgaggctaaggcaggaggattgcttgagcccaggaatttgagagcagcctgggcaacatggcaaaaccacacctctataaaaaattacaaaaattagccaggagtggtggtgtgcacctgtagtcccagctattcaggaggctgaggtgggaagattgagcccaggakgtcacggatgcaataagccttgattgtgccactgtactccagaaacaaagtgagaccctgtctcaaaaaataaaaaaaataaataaaaattcaaatcaagtatcttctaatgccaccattatactcttcagtgtatttgtacaggacraccgtacttgaagctattagctgagttcgagttcactttattactagtatgttacattcagtaagaacaattgaagtaggctctgccagtccccatgtgctttgggaatcattattccaggtaatcattttattggtatcacctttggtaaacaagttttgaaaaatatgcctacttgagccagccttccttataggaagctaaagctttctatttttcctgatggtagctgctaagcacaagcaggaaaaaaaaaaaatctcaaaactctcagaagttacataagcctctcaccaaagttatctgttgttttggtttgtgagagttctcataacaaaataccaaagaccaggtggcttaaacaacagaaatttgttttctcacagttctggaggctaggagtccaagttcaaggtgttggcagagttggtttcttctgaaaccccctcttggcttgcagctgtctaccttctcagtgtgtcctccattggaacatggtgtctctttctatatgtcctagtctctacttttaaggaaaccagtcaaattagattagagcccaccctaatgggctcattttaacttttttagctctttaaaggctctgtctccaaatagagtcatattctaaggtactggggttagggcttcaacataagaattttgcagggtacaattcatttcgtgacatttgttttaaggtttcactcataaaactggcacagtgtacctttgttttcagtgcaaatatacaatatattgtggtttcagtacagctttttcagctgcattacagatgttaggaaatcattaaaatcactgagctatagctaatacctcagtggagttccatcatagacacagyggactcatacaagtttgtctaaatatacatgatttaaacatggtataaaaagcaagaaaaaataatgcaaaatttctgccatttcgtgtaatgtgggagatggaaatgtatgatgttcatttcagtcttgtattataacttggtgttatacatgatttttacctttaaattctcactccatgtaagttgagacctcactgtccaaagaaaccaattactctatgtgtctttcaagtattttggaagtgataagccacaaatgctaacatggtgagaaaaagctttacttccactggctatcaggagtttctagtccatgcaagacaaaatatgacttgacctttgattggaagttgtgctgtgcatatttatgttagcttttatatctttcttgtagcctatctagaacacttaacattactgtgtccaagttgtctttgtaagtcacaaataatttgtatgcataaaatatttctgtccacttctgcagygttaaataccataccttgagacctagaaagacttttagattaatgtaatattttatggtagttttataattgtattcttctttacttgatctttttaaattcttttgctttaaatcctttagcaaaaggataaaaactataatagaaataagttttatttcatggctttaasagcacctaagttcctctactagacttgcagagatgtgtacctctgagttctctctagcaaaaaagcatgctcttgtggccttctggggaagaggactctgaggcccactctggtttgacttgtatgtgattgcagacctttgacttgcagcctctgagacccatgtacctgagttcaagaagtggtatgtaacacccatgaaggcagagactttggtagraaggttttcataggaaagatacaagcaaatcagtcaatataattttgggaatctacaaagctaattgataacacaaaaagcttccaacttgaggcaagggggaaatgttttccagaaggtaaattgttaatagagtccaatgagctatttcagatttatacaaaatctctttttttatgttttcagtaatgtctatgccttataaatacatatatatatgtatacatgtaatgacttttttatgttwacaagtggaagtattatgacataggactaaaaaagaaaaaacaagtaaagtaattttacttcttttctaaattagctggttataataatttagaagttgcagagtatttgttacaacacggagctgatgtgaatgcccaagacaaaggaggacttattcctttacataatgcagcatcttacggggtaagttcttccgtgttacctttaaaaatttgtggaattttaaagtgaaagtcagtattgcagctcaaatggaatgtagtttgatgttctcattttacagagaagtaagtggcagagctaaagaagttaaataacttccaaatttcggttctgaatctgttctaagcttgctgtgtgatatgcggtgtattgttgtttgttttattatctgccttaacacctgtctcttattttcagtgagatgttggtgattgtgtttatttgttggtacccagaaaatccactggggcaccaacggggtagatggaatctgtacagattcagatgcattgttcctgacttatcatagtccaatgtgacattcaaaattgaccatcttcaatggtatagtttgaataattgaggaagattgctgctttataaattgacatttagtagttataacatttgaataaattagaaattattgaagtcatattagtctagtttcctgctaaatagaattcttaactcttttctagatagtttctcaagttattgaaatgtccactgtaatttttaatcagctactcataagttgtgatgttggggagaaagagtttttcttttcatttccagartaagtttgaaaatgtggaagtaggtacgtaactagtttcattttaagaaagtaaagtgtgacaaaataatatttcagactgtaacgggtattttcttttacagcatgtagatgtagcagctctactaataaagtataatgcatgtgtcaatgccacggacaaatgggctttcacacctttgcacgaagcagcccaaaagggacgaacacagctttgtgctttgttgctagcccatggagctgacccgactcttaaaaatcaggaaggacaaacacctttagatttagtttcagtaagtgatgggctttttgaaaaatctcagtgcttttctgacttgttaaaattcacttgatgttattataaaatgtctttatagtcaatgtgaatggcaaaatctgggttttagcctgattttaatgtaagagttctttagtattaaaatataatagaattataaagtaatataattatccttctgtagaatagaattatcaatcagttattatatactgagtattttggaaataggaaaaagaagtacatgatataactgcttacgttagttaggaaactaaacagacccaggccctcagaaaatgctgttacttatagtgcatacagcgcagatggtacagaccatgggtcttacacacggccccaactgggaacattgccccccaaggtgcagccacaaaccctgctgccagtagagattccttttcctcccacactgcctcatcccagagttcttgttgctcaccctaccttaactgttcatgaaacaagtctattatccactttcctgtggaggtcctgttttccttcccctctctccagagcatggagcaggtgtaggagcttccactgaaccttccacctctgctttgggcactgaagcagatgcctytcttgcctctaccactgaggacattgactagagcagtggaaagaaaggaggaaggaattctttttgagatgagaaggaaggggaatcttttctgcagactgctttctactgagaaagattacattgttccacattacaataagaaactgaggtagttcagctgcattggtgcttaagtaggtttttctcagtcagctaacaacccagccatatttacaacattatctcttcagggaaatatctttctagttccaagttaccttaaaagtgaacatttggaattcattccacccatatgttagttgaccagatacaattaagttacaatgaagcaaaatgctgtagagaacatacaggggctttagagtcaracagactgggcctagaattccagctgcacgatttaagttgtacaatcttatgaactgcctaacctctaaaccttagttacctcatctatagatagaggtaaaatatatctggttagtatgagaattaaatggggtaatttacttaaagtctttggcatggtatcaggtacataaaaagcactcaataaatggtactattattataaacaaatgtcatttacaaattgtgagtgcaatgggaatgcatagactgggggaagagaaaggtgatgactggaatagtcagaacaaatgactatgaaacaagtactaatttattccttgctgaacattagttgaacgttgtgaaagaagagtacatattacaaattaaacaaattaatgtaccaataaatgtgaggacttttttccattctagcagattttttttaatttttatttattattatttttttgagatggaagtctcactctgtcacccagactgtagtgcagtggcacaatctgggctcactgcaacctccgcctcccaggttcaaatgattctgctgcctcagcctcccgagtagctggaattacaggcatgcgccaccacacccagctaataatttttgtattttcagtagaaatggggtttcaccatgttggccaggctgacctcaagtgatcgacccacctcggcctcccaaagtgctgggattacaggcataagccactgcacctggccccattctagcagatytgattaaaatgattatcttttctacccacctcctctccaaaaaactttcagttttaaggaacaaatacattgctgaatattttccaggaaatacaaacaattcagtttgctaaagttctgtgtaggttgaattacttctttcagagtaactacaataggactaaaatctcttaccttttaaaattgatatttctgtaattcgttgtgcttctcagtcacartatcagaattagggttttgttcatgctttgccatatttaaattatattttgacaatatgtgttttggaagagatgttctcagttatgtcttatattttaataacagtttagctggatacaggttgaatatcccttatcggaaatgcttagaaccagatgtgttttcggcttttggatatttttttcagattttgaaatattatactcaagcattatacttactgttgagcatccccgatccccaaatctgaaatccaaaatgctccaataaacatttcctttgagcttcacgtcaacattttaaaattttcagatttgggatgtttgacctgtattaacctgtttgcttcactttttaaaatgaataatcctccattgtgatagtactrgcacaaattgctgggttttctcatatttttaaatatattttattaggtataatagcattttaaaacttgcttatggcagatgttgtctctgacacgtaccctaggcrgatgatgtcagcgctcttctgacagcagccatgcccccatctgctctgccctcttgttacaagcctcaagtgctcaatggtgtgagaagcccaggagccactgcagatgctctctcttcaggtccatctagcccatcaagcctttctgcagccagcagtcttgacaacttatctgggagtttttcagaactgtcttcagtagttagttcaagtggaacagagggtgcttccagtttggagaaaaaggagggtgagacgttctacaaaaataactttctaactggtattgtagccccgtatttgtcatttgggatgctaaaaagtcatttttaaccttaaatacaaggtattagtataaaattagttaacatagccttaaaaaggtttaaccttgtattactttcttccttccaagttgacagttgaagagtcttgtgctactaacctactatttatttatttatttttgagatggagttctgcttttgtcgcccagactggagtgcagtggcrcgatcycggctcactgcaacctctgcctcaagggtttaagcaatgctcctgcctcagcctcccgagtagctgaaattgcaggcacccaccaccatgcccggctaatttttgtagttttagtagagatgggatttcaccattttggccagactggtcttgaactcctgacctcaggtgatccacccgcctcggcctcccaaagtgctgggattataggcgtgagccaccgccccccgcccttaatctgctctttagatgtaaaccttttctgttaaaattcatcccaccttatgcaacagtgtggagcttgttttcataaacttttttgtgaagtagcttacatcctgaaagataggaaaactggttttaaaaatatagatgcaattaaaaacaaagtttaaaataaaaatgagagtactgagactgccccattgattagcttttttctaatgttgaaattttgtagctttctcttgttcagtattatatcctaagtggctattaatattattttcttcatatatagtaacattacaagactttactgttatagtgatgaaatacattattctgatgtgaaattccatttgttttggatttttttatttcccagttccaggagtagattttagcataactcaattcgtaaggaatcttggacttgagcacctaatggatatatttgagagagaacaggtgagtagataaatcatattgtttggattagtgttttatggaaactcaaggaaaatttggaacatacttgaaatgagctgaaccatgtaagctattgggggagaatgttttttaagaaatgacatcagtcagccttctaatttggcttgaccttgaaacttccatttagtttattcgcacacagttgactcgagtagtaatggtaaagtagctttcttgaatggaaagtttagcttattcagttcttgaagtaagttatccttgagcactgtctattcagttctctctcaagcctgacacttttctagctgctatgggaaggtatatgaatatgccagccrtatctgggcttttctaagcagtctcagtttaaagtactctgtcagaatacatttactgatttttgttgttgttcagaaaataatgttactgtagatttgcactctaagggactttcattgtagttatggaattagaataagaacatatggccgggtgcagtggctcacgcctgtaatcccagcactttgggaggccgaggtgggtggatcacttgaggtcaggagttcaagaccagcctggccaagatggtgaaacccccgtctctactaaaaatacaaagaaattagccaggcatggtggcaggcacctataatcccacctactcgggaggctgaggcaaagaattgcttgaacccgggaagcagaggttgcagtgagccaagatcacaccactgcactccagcctcggcaacagagcaagactcggtctcaaaaaaaaaaaaaaaaagaacatatgaaaawtcaagttttagcatagattttagaaatttgtagaagggagccaggcacggtggctcatgcctgtaatcccagcactttgggaggctgaggcgggtggatcacctgaggtcaggagttcaagaccagcctggccaatatagtgaaactcttccctactaaaaatacaaaaaattagctgggcgtggtggcgggcacctgtaatcccagctactcaggaggctgaggcaggagaatcgcttgaacccgggaggcagaggttgcagtgagctgagattgcacttttgcactccagccttggcaacgagagtgaaactccgtctcaaaaataaaaaaacagaaatttgaagaaggaaaggattaccgtgagctaggctcatcagggaatgcttcatggaacgtgtgtaagtaaaacaggattttaaagaatggcttcaatttcatgaagccatagtgtattactgtattaaaggtaaaagggttactttgaacagtgatgcagaagtaccacttggcatagtccagactcagcaggaaccattgaaagacattatataaatagggttggatgtagagtgatggtagaaaagtattatggaaaagataaaatagaataccygaatgtggttaatttgaaagtgcctttttgttttgcgttttagttctgctcaggttcttatgctaaatggaaataatatttttagaaatgtttaaaataatctggagtaaatgtgtgaatcttayatattatgaaaacaccaatatatgaatgtccaccaaataagtaagcattctaagtagtttcctcctcttttgtaagatcactttggatgtattagttgagatggggcacaaggagctgaaggagattggaatcaatgcttatggacataggcacaaactaattaaaggagtcgagagacttatctccggacaacaaggtattttattttaataattgctgttgtcagtttaacagtttgcataaaggcaaccctcagtgtactaagttataatttaaaaatatgtakagagaatctgtttaataggaagaatactaatttaggattcaggaaactgggattaagtcttagctgtgctactgacttaaacttactgagctgctgctgttaacgatgtgaacctaagtaaaatttctggaccattcagaaatttgggaattgttttagctcctgaaaataaggaagttagtttgagattattttctgaagttattctagctcttaaattgtattattttaaaggtctgaaacttaggtatcacatttcttatggtaatataatagataataactaagtgttcaggctaacccttaaagtactatagtagatctcttatgtagataaaattttaagcgcttgggatgaaaatactggaaagcaataatgttgcaactgaggaaattgaacaaaacaaagttgaataatatttttatttctccttaatgttggtgcttaaggaaaatgcaaattgcatttattcagcagatgttaacactttataccaggtctgggtataaaaaggtgaattgtggccaaacgcggtggctcacgcctgtaattccagcactttgggaggccgatgcaggtggatcacgaggtcaggagatccagaccatcctggctaacatggtgaaaccccatctctactaaaaatacaaaaaattagccgggcgtggtggtgggcacctgtagtcccagctattcaggaggctgaggcaggagaatggcgtgaacccgggaagcggagcttgcagtgagtggagatcacaccactgcactccagcctgggcgacagagcgagactccatctcaaaaaaaataaataaataatataaaaaaataaaaaggttaattgttttggctaggctcagtggctcatgtctgtaatcccagcactttgggaggccgaggygggcagatcacgaggtcaggagattgagaacatcctggctaacatggtgaaaccccatctgtactaaaaatacaaaaaaaaattagccaggcgtggtggcgggcacctgtagtcccacttactcgggaggccgaggcaggagaatggcgtgaacccgggaggcggaacttgcagtgagttgagatcacgccactgcactgcagcctggttgacagagcgagactccgtctcaaaaaataaaaataaaaaggtgaattgttttaagtgtcaaaaccacatttaactttattgttcaactgagggagtgatttatcttggggtcaaaaatatccaataattgaacgtcctggctgtacacctggggttaaagagaaacctccatcagtaaaaatgaaggtattttcagggaagaatgtatgctagccaggatggggtccacctctgaagaaataagagcacctctaaaaatgtagatgattcaagctaaggaatactttaaactggtattttagaataagctcaattaaaggtagatgtattttactgcctgataaggactaggataagawatttaaagtgcaatatgctcttggctgtttctagtatagaggacaaatttttgtaagataaagaggagggaaagtccatgatttcctgaaatattagtatacaatataattagcactaaaaatgagaaactagaaccctcagttgtagaccatcgttgtaactctactggaataatactgatctggtatgataacaattatgttggagtaccaggataacaagagtcttttaggaaagaggcagagtagaaaaggaaagcaggcagtatttgtgtattaaacatatcatagctattaggactgcactgaaaagctgaaaggctcaatgacagaaatggatacattgcctccaaatggcagaggtacttccatgccacctctggtcctgtagtcactctgatacatccagctccacttggataggaacattcattcctatatgaagaagaaacgtcatgagacaaaatgctgtgtctgatctagcatatcagggttactttactacataaagttaccatcttctttatgttcattcaaagccaatactctttttttcccccaacctgatgttagtcaaccaacagggattctgtacttacacctgatttgcaaagtggaactggtagctgcctgtgatgatcttctaacaatctatcatgctgacttaacagccttacctatcattcaatgcatcaagtcaatagatgactagtaccatactgatctttcagtattgataaatatcatcttgtatatgttgcagatgcctcagtcargcatttgtcacagtctttattctgtaaaacactctccatatgctcttcataatccttaaagattattgcagttcagccacttctgtaagtgtttattagcattggcatgttggtagtagtcctgttcttcagaccatagctttgaaccagaatagtgctcttcatctccagagacaaacttccatgcactaacccagcagtaaaggatttggcccctacatgggaaaacagcagtgttggagatattgttgtagagattaaaggagagagttgtgctacaaatacaccaaaggaattagaaaattctgtttaaaattccatttaaaaagcttttataagaataaagatagaaaaatagatatgattatcttgatcattgacatttggaaaacacacaaattcattgctgaggtaaacaatctattatgggacagaatatacattcaataggtggtaaactgtgkatttctcattctagggtgatttaaaattacctgaggctatgcaagtttctgtcataattcttcctcatatttacaaagaagaaagagattaaatgttgaaagggctgcgtagttagtaaagaaagtaatttgaagaagaaaatgtgttacaaactcattaagaataggagataagagaaagattttctgaaatatttccataaaaccccttataacttgtcaggtcaaaaagtaatagtctaaatgcaatgtggtatgtgtactggttttgatcctagaacaaaaaaaaggacataagtggggaaactagtgaaaaaatgacatctataatttagttaataagttttgacaaatgtgctatggttatataaaatggtaacattaggggaaagtgggtgragggtacataggaactctgtactttcatcctttctaaatatctaaattatcacactatgaaatgtttttaaaattgatagtaagcggccaggtgcagtggctcacacctgtaatcccagcactttgggaggctaaggcaggtggatcacctgaggtcgggagttcgagaccagcctgaccaacatggagaaactccgtctctactaaaaatacaaaattagccagtcgtggtagcgaatgcctgtaatctcaggtacccgggatgctaaggcaggagaatcgcttgaacccaggacgcggaggttgtggtgagccaagatcacaccagcctagcctgggcaacaagagtgaaactctgtctcaaaaaaaaaaaaaaaagtttaaaaaaaaaaattggtagtaagaatcagaaaaattaggtggttatttttggttttgatgttcattgtttattggcaatttatttttctaccttcaaattttgtttcataggtcttaacccatatttaactttgaacacctctggtagtggaacaattcttatagatctgtctcctgatgataaagagtttcagtctgtggaggaagaggtatgttcatataacttcaatagtaggtttgccgtatatatttagttcactttgtatcctcttgtttctttttcttcctttagtttgcattatataattttcacctataaaatctgttttcaagctgattatctaatattactagagtaatattactctagaaaatattactcatgaatttataagactcatattctttgttttttgtgtttgtttttgtttttgtttttgtttttgttttagtagagatggggtttcgccatgttgcccaggctggtcttgaactcctgagctcaggcagtccacctgcctcggcctcccaaagtggggcaccatgcccagccctcatattctttgaataacaaaaatattaaaacctgttttgtattctcaaaaatagaatcagacgagtcaagaaccatgttccccaaatcagaaaataacacaaatgctaatgcacatatatttcaaaccatttttctgacagatgcaaagtacagttcgagagcacagagatggaggtcatgcaggtggaatcttcaacagatacaatattctcaaggtaataaattagtgaaagtaaagttttctgagactgtcgttttcaaagcctgaagccataagtaactttcataagaatctaatctgtctagcctggtaagtccttgacttggcatcagagactattttgggaaagaggatacccttggaaggttaatattctccaaatccctgtgctatttttaataaaggataataattcaattcttgttgaacatattcaagtttatgggttatgctttatcttggggtaatgctaaatactataggttcaatactttatataaagtactgttaaagtactctattgtaacaaagctgaattttttttgtggcggataccatctttatagtcatacaatgcttatttttttatcctgattgactacaggtttctgaaagtccccaaatatattatctttttataaactttaatagtactctcttcatcttttccaraaaaatatattttaaaaatgttttgagtcatttagtgactgctgtcttactgatttcagttactcttcttaggaactttttcaacattatgtttttcttgaactatagtaatcaaaactgcacaccatacttgatgcataatgaattcgtattaactacattgatgcagtatattcctaataattgtaaaaataagacagaattaatatgtgacaaatgcctttctaatacacaaatgctaaactctgaacagtatcaaatctttcagctgtattgtattactgtttcataacatactatgagtataatatgtaatcaggcaaatacatgcctactacaggtacatttcagtcaagtccactttgtctacaagcattaacaaaatgtgtggagttttgttaggagtgagagcaggagagaggttgtgtgtttgatttctaaagtagttggatttgagaaagatacagttttcttcctctaataaaggtattttcatgcgttgtgtaataaaaattttttcagtgatgaaacgggttttttttgttgttgttgttcctttttaatgcataaatgagatctatttgtgacagttacgatccttgattacatctgtggcaatattttgcattatttgagccaagactaaaaccatcagcttccaggtgtgctctaggaaccagcagggggctgtagcacctttaaacacagctaagaaacaacactaktattgtgaattttgttcctagaaatactcctaatgagactgatatccaccttaaaatcttctgcggacaaaaattttctgaatcagaaggtcgagggagtaattgtgtatgtgttgaggggtgggggacgctatttcaaatattcttaatttaaaacagattaatatggaactcagacaaatacattggggaaaaaggataytcttctctttctagtactttatacagaaaaaactcggcatgtctgatttggaggtgtttttgtaatagttttaagttaatgagaatggaagtgttttaataaattaacagtattcctgaccttcacatatggcctttttttctttgaatttttttaatctccaaaatgtagctatacttccaattttatggttgggacaaagtatttttagttgattaaaataacacattttatatttcagagtacagttttgcctaccttctagctaaatgtatgtcccatgtttggtttagatgaagaagtcagtaagtaattcctaaagatttgatttttctggtttattttttatagattcagaaggtttgtaacaagaaactatgggaaagatacactcaccggagaaaagaagtttctgaagaaaaccacaaccatgccaatgaacgaatgctatttcatggtaagattcctccccaccractctaccactgtcttccacattaggatagtttttttgttcagatatgaaataataataagcctgtatattctttatgtcagtattttaagataaacctactatttctgtaactttcacatttatattttcaacttcttttgaatttgtgtattttataatggattgtttttaaataagattaccacaataaaaatagaaatgagagtgttgactatcttttccttttttctttaaatagtaaattttgcttatggtcactctaggaaattttgtgttttccatttaactagttgattgaattaaaaataagacctgggaatcacctcagaagaaggtgtacatcctattctgattttgattctaagtatcaaacccacacaatttgaaaagagccattgttattgaacctgtagaggtttctgatgactgtagaattgaaaccatagaattgaattgaaagcacaattacttattcttcttggaattttctactttttttgtattataagctggcaggtgttgattagtctttcaaattttagcaaagttaaacatattaatgtagtatttatgagggcttcaagtacattacccatagtagttccagtctgtttcttcatttgtccttgattgcagaaaaattttagagacctgtaaagttctctaaaacacagtaaatttcataataccctgggagaatggctgtaacagaatggattcatgtgcagaatctaaacatgttgcactccttattccaaaaccctaaataattatcatgataatctcttgacacagagcatatttatttatctgttaattgatggttataatatggtttttctaatttgtaatataaataattttggttttcccaagttaattcaaaaaatgattctattcatctgtatttctgtaaagtagaattcagtatattttcctgtctgtctgtggaaagggaatgtgatcttgataaatgaattagctgtggttttttgactttttccatcccccactctactccactcccaaggaaagaggagagagaagtcaatgtgcagggggtgagggaaagcaccacatttgcagatagaatcttgtatcgtaattaatgaaaggcagaagtrgaaggatagaagagaagaggtataagaaagagaataagaatgtgaaagttgggccgggtgcggtggctcacrcctgtaatcccaacactttgggaggccaaggtgagtggatcacctgaggtcaggagtttgagaccagcctgaccaatatgttgaaaccctgtctctactaaaaatacaaaagttagccaggcatggtggtgtgcacctatagtcccagctactcaggaggctgagacaggagaattgcttgaacccgggaggcagaggttgcagtgagccaagatcatgccactgcactccagcctgggccacagagcgagactacatctcaaaaaaatttaaaaaaaaaaagaatgtgaaagtctacttgggccacttggtatcttcaaaaaagcacacaggcataggcatcattctaagacctaattgcatttagctttgctatctaaagtgaattatgagcctcttggttttagatttttatggatttgcagtctggcatttggtaactcttacactgatatttcaagtactctgtttttctagttcaatctgtgtccttattttagcacataaaccagcactctgttagaaacattagttgatgttagcagttctttattctaaaatagctggctgacagttaacttgttaccctttttcgttttggctttattatggttgggctatatatttaagaattcagtttctaagaaactagttttttactttttattctaagataaattttaaattattgttacccatctatatgtgtttcagggtctccttttgtgaatgcaattatccacaaaggctttgatgaaaggcatgcgtacataggtggtatgtttggagctggcatttattttgctgaaaactcttccaaaagcaatcaatatgtatatggaattggaggaggtactgggtgtccagttcacaaagacagatcttgttacatttgccacaggtaagagatcacttgttctcatttattttggtggtaatcagataagaactagttgcatttttgagggcaaagcattatgttggacagtcttaggaatgcaagctaggcatgttttagattgcttttggccctctcaccaattgtaataatagctaatatttattaaatgatccgtatgggccaattataatttaagcacttgacctgtttggctaatttaatcattagaatatctggtgccttaaagcatactgagtagaaagtaacattaggcatgaaagaggctttattgtagcccttgagtattgtaggactctgtggactctaaaaatctagtattcaaatgctaaaatggcattatttgtcaaatctaattatttgatggcagtgcctgagcctctcttccactgtgatacgatcctaatcctcaatttgcaatattactataagaacttgaaattaaaacattgatcctttttgaaaggaaataataatcaaataactactttgcactttttttttccacttttaattacctgttctaactcacttgttaaaaatcatttaagtaacttgtccctaacttataaaatccttataggcaaaaagtaatgccacttgaaaaatccagtaagattaattcctgagatttattcgacagttagggcactgcttattgaatatacagagcagtagtttatcaagcattagcatgcattagagtcacctagatggcttgtttaaatcacagattcttaggctccaccttctcagttgctgatttagtagatctgggatgagactctagaatttgagtttctaccaagttcccagatgtgacactgtatttctgaccactgatctagaaaaaaacccctagagcagtactttgcactttggcagcacattggaatcacccagggaatattaaaaaactattaatgcctgtgtcccaccctcacagaatctcttttaattggtctggggcatgatctggatattagaatttttaaaagcttcccagttgatttcaaagggcttccgagctgaagaattgcagtcatggagggaaacaggttctttctttgtgtttgttttgttcttactgttacccctctaaatttaggcctgcataggtagtacacagtaggccctcctatgtatgacgtcccactcacttctattttagatcataaattggagtggttaggaggcatgtaatttcctgtaaattgaacactgctgtttttatttgtcatatatggtctgaaggctaaatagttctgattattagtaataagcagcattctaatacctccctcttctttggaagatagaaccatcaactggtctacagaaatctcctgttatcttctaaaaagaaacaatgacgttaatactaaaaggttgtttgaaactaagaaaggctagtcacatgcctgagaggagtgagagggtaatctactgaaactggtggtgaggggagactaccagtttacttcctatctaaggaagtaacatttcagctgaagtctgaaaattgagtgggtatcagccagtggaagagtggtaaaatagataacattccaatggtggagaaaattctgtggatggggaccattaataaagcaagtttggcctttgtgaagaaaagaaaactaatgtgcatggggcataatgaacataaaatgagattcaagaaattggagccattgtacagaatttggattttctcccaagtacagtgacagcctctaaaaggttttaagcagaaaagtgacttgatctaatttttgtttgttttaattagttggatgggaaaggtttggacaggaattacagaagaaacaggaagactggtttagaaagccattgtgtgatagtccaggtgaatatttcagtgatttgacttaatagtgacagtagaattaagaaaagtaaatggatttcaaatatattttgaaggtaaaatcaactggagttaattagatatgtgtccaactttgcaagccacttaatggaagtccactaaaccttctccttcccacttggccagtgacttttgttttttgctgagatacaaacaaggtggtagagtctgtatctctataaggttattacatttttcagattttatagttaaaataaggactaactaaattgacaaattatttcattaataagagtaatagaagacattcttaaaaagttcttttaggggtgaaatgataaaaacaattataagtatttatgtataaataattttttaaaacttatgccgtgtccacacattgtcatatttatgtatcaaatttgacttcagggtgatcttttccttttcgttttataggcagctgctcttttgccgggtaaccttgggaaagtctttcctgcagttcagtgcaatgaaaatggcacattctcctccaggtcatcactcagtcactggtaggcccagtgtaaatggcctagcattagctgaatatgttatttacagaggagaacaggtaatgtagttttatttgttcatcttcaaaaatgctagggaggcatactttaactttttattaatctcttgaattgacaagacatattgccttaactggattttttaaaaattttatttggagataatttcagatttggaaagttacaaaaatagtaaagagaattttcttataacctttacctagatttcctaaatgttaatattttgttctcttttttactcttaccattctctccttctttccttgtgtgtgtacctatttttttgtgaactgtttgagagtaagttgcagggcatgtccctttaccattaactatttcaattgtaaatttcctaaaaacaagaagattttattcaaatttcgccagtcgttccggatttttcttagctcttataaataattgaaatmttgtatttaacagcctgtccatagcaaagaagtatataactgtgttttgctctcagtgagagccaaaagtagttctagagcagtgttgtgaactgggagtaggtatcggaatcaccgcagttactaaaatcagacatgattttagtcttatctgatacttatgaacttagtattcatcttagacttgctgattgaaaatctgaagaactgtactcagggtaaagatgttttgagaaaatgtccctagatgattctgatctacaacagtaatttagaacctcctccctaagattaggaatacttccggaaagtctgtttatctttcaagaaaatttttgtaccattatttgaatttatctttctcttccaggcttatcctgagtatttaattacttaccagattatgaggcctgaaggtatggtcgatggataaatagttattttaagaaactaattccactgaacctaaaatcatcaaagcagcagtggcctctacgttttactcctttgctgaaaaaaaatcatcttgcccacaggcctgtggcaaaaggataaaaatgtgaacgaagtttaacattctgacttgataaagctttaataatgtacagtgttttctaaatatttcctgttttttcagcactttaacagatgccattccaggttaaactgggttgtctgtactaaattataaacagagttaacttgaaccttttatatgttatgcattgattctaacaaactgtaatgccctcaacagaactaattttactaatacaatactgtgttctttaaaacacagcatttacactgaatacaatttcatttgtaaaactgtaaataagagcttttgtactagcccagtatttatttacattgctttgtaatataaatctgttttagaactgcagcggtttacaaaattttttcatatgtattgttcatctatacttcatcttacatcgtcatgattgagtgatctttacatttgattccagaggctatgttcagttgttagttgggaaagattgagttatcagatttaatttgccgatgggagcctttatctgtcattagaaatctttctcatttaagaacttatgaatatgctgaagatttaatttgtgatacctttgtatgtatgagacacattccaaagagctctaactatgataggtcctgattactaaagaagcttctttactggcctcaatttctagctttcatgttggaaaattttctgcagtccttctgtgaaaattagagcaaagtgctcctgttttttagagaaactaaatcttgctgttgaacaattattgtgttcttttcatggaacataagtaggatgttacatttccagggtgggaagggtaatcctaaatcatttcccaatctattctaattaccttaaatctaaaggggaaaaaaaaaatcacaaacaggactgggtagttttttatcctaagtatattttttcctgttctttttacttggttttattgctgtatttatagccaatctatacatcatgggtaaacttaacccagaactataaaatgtagttgtctcagtcccctccaggcctcctgaatgggcaagtgcagtgaaacaggtgcttcttgctcctgggttttctctccatgatgttatgcccaattggaaatatgctgtcagtttgtgcaccatatggtgaccasgcctgtgctcagtttggcagctatagaaggaaatgctgtcccataaaatgccattcctattttctaatataaaactcttttccaggaagcatgcttaagcatcttgttacagagacatacatccattatggcttggcaatctcttttatttgttgactctagctcccttcaaagtcgaggaaagatctttactcacttaatgaggacattccccatcactgtctgtaccagttcacctttattttacgttttattcagtctgtaaattaactggccctttgcagtaacttgtacataaagtgctagaaaatcatgttccttgtcctgagtaagagttaatcagagtaaatgcatttctggagttgtttctgtgatgtaaattatgatcattatttaagaagtcaaatcctgatcttgaagtgctttttatacagctctctaataattacaaatatccgaaagtcatttcttggaacacaagtggagtatgccaaattttatatgaatttttcagattatctaagcttccaggttttataattagaagataatgagagaattaatggggtttatatttacattatctctcaactatgtagcccatattactcaccctatgagtgaatctggaattgcttttcatgtgaaatcattrtggtctatgagtttacaatactgcaaactgtgttattttatctaatccattgcttaatgagtgtgtttttccatgaatgaatataccgtggttcatatgttagcatggcagcattttcagatagctttttgtttgttgggaagttggggttttggggggagggggagtattagtacgttgcatgaaatagcttactttataatgatggaattgctttttcttttgtcttgtgatttttttttttgaagtgaaatttaactttttgtgcaagtagtactattatacccatcttcagtgtcttacttgtactgtatcacattccataccctcatttaattcttaataaaactgttcacttgtttttctgggtagcatggtaattactggaatagtataaatgtgttgaatggtctttgagaaaatgaattaagattacaataaaccacaattgcaggaaaacaatgtagttctgagtctaatagtgataaagaatgcagtttgaagtttgaaatattgaatattgtagctgtacttgctcattaaaatgaaagtagctgtgagatgctttcaacatttagtctattcagcacaactggtaaaccttaaagctcattcctgggaaattaatcttcttaacttataaaaaggaatatatttttatttctgtgtcatatgaaaacattcttaataagtttccaaatctcaaagttagtggtatttattgctattaaaagaaagagtaatcgcatatgtatattagacttcagtatgttaagtttccttgtgtgtgagcaattccctgatttccataataagagaatgatggtgcaaataattcttaagtcttttggctttgaaatacatttcagcagctctgtgttcctgcttcatttagggtaatatggaagtatttgctgctatttcaagtatgcatgccagtctcgggtgtttattgtgatccagttgtttgcaggttgatgaggcaagaaagcatgcagatttcccagagctcttatagtcagtactcctgactgtgcctttacctgctgtcctattacaggactagagtgacaaaggaagcaagtagtggtggtactcatttttcaccaggagaactgtcagacttctataaaattaaattgtaatatgcctttccctgtctcctgtgtctccacacctcctgcccttttgtgctgactagtttagacaggctatgacctaaaatacttaattactgctcttcacataaagccattattattagaagtgatgtctccaccttgtcacccacccacagctgtcatttccgtaacacaaatatatacagagcccctcaaagcagtatgcccacatactacaaagcagcactatacaaaggtgtgatctgccgatgggattggtctgcgaactgatattgttaccagcccatggagatatgaatacaaaaagtaagggtaaacttttaaaaacttttatagcaagacattgctgtaatttatttttcttatttttaattgaaatattggcctgcaatggattggaaacttagaaagaaactgatccttcacagataatttgaaaggtttcacatctgctttgtataccagtagacttagcacctagcatatctggcacatagggttcctcagtaaatttttcgttgggtgaataaatagtgattaagtgattgggctgtaaggtcagatgtatatggattttaatttttattctacccctcaccatcgttgtgatcttgaacaaattatgtaccttttaagatttttataacactttataaggttgtagaaagtaataaatgattttctgtctgtgctactaagcattgtacttgccagtaactggttattataattaatatttccctgaatattccagaattaatggcttgagttttcccacttgtcacggaaacatagagcatagaattttaaaactgcaagatgtattagccactaattcctttattctaatgaaatcttaagaagctcaaaatataaagtatataaatccctaacccacaggaatctgttttaaaattactgatatgagcacacagacagacatacccataatccagtctgcatcatatttgtctagaaaaaagcctcactcagatgaactcatcaaaaatccaaaacagtgtattgtaagcacaaatcagtagagacaatcttggaggattagcacctcccacaaagtagtgaagtaaatattgtttaaaatgattgggttgagggtgggaataaaagaaatcattaaaaccattaagatgacgctgtgaagaaggcaaagtcttcgaaaaagtaagtctttagaactatatgtaattagaaattaaaaactcaaacattacagactgggcatatctgaagatagaattggggaactagaagatacagtggaaaacacagattgtagcacagagagaagagatgggaaatacagagggctaggagacagaacagaatgaggagatacaacataaagaataggggagggaagagacttgaaaaatacccaagaattcatagagaatatgaatctttaaagaagcagcagcttaagaaacacctaggaggatgaataaaagcaagtctgctactagacatagtgaaactgcagagcatcaaaagacaagaaaaaaaatacttactagaaaagacaaaggattaatacactgacagcagatcagtggcagcaacagaagccagaagacaaaataacttagaagtgctgaggaaactactgttagcctagaattctatacacagataaactagtacttaaaaaagaggatgaaaaatgcatctgctcttttgctgagagatctagtagattgttctttagcaaagaaagcagttgaatccaaaagagcaggatgcaagaagcatagtgcacaaagaaatcggcaaacatgtcagtaaaaaggctgaaataatataactgataaggaataatattcaagaccaatctgtatgatttgctactatttgtatacgtaggaaaaagtacaacatgcatttgcttgtttatgaataaaattccttcaggatacacgtgaactgttggaaggaaacctcagtgccactgggatcagatgtgaaagactaaactgtatatccttttattccttttgaattttataacaggactatttaaagcactataataagcattgtctgcaatacacaagtaatagatttgagatttttaaaacaaggtggaatgaaagtactagttgacaatagtatgggaaatagaagctttaagatgctgatgaaatttagactttaagtcaagtatgcatattaaattttcaaagataatcactaaaagagtagaaatcgaagtgtaaagattgaagaaaggtaatacaaatgaaccagtcgaataaaaataagaataacaggtgactcgtgcacttttttccccaaaaaatatgtcaaagaatcaggtgaacaggaaatatctgtaaaaggttaagagtatcctggacgcacctgaagaagaaaaataaagcaggagaaccagagatgaagaatagaattaatgctgtcgtaactgagatagtgtgatattgatataggtgtagagtctttgaccagttgaacagagtttataagggctttttatataccagagtagcactatagatcctgaggaaaggaggaactattcaataaattgtaatgggacagctggtaatccacatggaaaaatacatatctggatatatacacaaaaataaatttcacatagattttatataggacatatgtgaatagcaaaatattttaaaggtttaaaagaaaatataagaaactgttaatgactttgagataaggaagaacttttttttctttttttgagacggagtctcgctctgtcgcccaggctggagtgtagtgacgcgatctcggctcactgcaagctccacctcctaggttcacgccattcaaggaggaactttttaagtgaccttcaaacaacactgaccctaaaaggttggtaaatttgactgtattaagtttaaaagcatctgttaatccaaaggccactaagaagaaagtaaagagacaagtcataaagtgtgagaaaatatttgcagcacataaagggcaaataatttatattcaggatatactaaaaactacaagaaaaaaatgaaaaacgcggggcggggggcgcgtgtgaacaagcgtttctcaaaatgggaaactcaataaacatcaaaaaacgcttagcctcattagtaatcaaggaaattcaaactaggtaccataaggtaccattttatacctgccagaactgacaaaagtaaaaaacttagcaatgcaggtgttcggatctggatcccatacattgctgttggtgtgagtgcttttgaaatccatttggcattactggtaaaatgagaaattcctccgacatctaggtgtggagagaaacccttgctcagcggcttcacgagtcatacgaaggaacacaacactgatcacaatgtttatataatgactatcttctctttccactcttcacagttctccagcctcctttttgccccagaaatctaatcttgatgggctacatggacagattccctgttctctggctttccccttttaacccaaggggagtatcagccggatgttggagggtgattaggaagagagtgaaattcaaacatctatttcccagctcccatcctgatcagtctcaggacaaccttggcactattgacgttttgggaagataattacttgttggggctattctgtgcattgtcggatgtttagtggcatctctgatctctaatcactaaatgcaaatagtacagctgccccttgtgacaaccaaaagtatcccagacattgccaaatgtcccctggaggacaaaatcgccctgggtgagaatccctgggttagctgtccccttcactaaaaggtcacccctccttacagagtggccttccttcttacacaactttggaggtaaaagcagtcaatgtaaaaactagcgatttaagggaataaaataggtaaggtaatcaagaaaaatcagaaatctacaatataaaaaagttttgatagagaagtagccacaaatacaaagaaaaatgtttaaaaattttaaagaccgctttgctcaactccatacaaataaatttgggaactgagataacacctagggtaatattctagtaaaacacaaatgactaaaactaacccaagaaaagagagcaagtctaaacaaaccagatgccaaaaaagaaagaaagaattctgtcaaagagctatccccaaacaattcccagacccagggagtttcatggtagagtcttacaaaacattaaggaatagataactccaatgttatttaaactgttctaagagtgtagacagtttccaattttttaataaatacatatagaattaatatcaagcttcaacaaggtgagagaaaaaggagtggacattaatgcacaaaatgttaattgcaagcaaaatctagcacaacattaacagaataataccagtaggaatatagataaactgcaaatggatatgagtgagctttcgggtgatggaaatgttaaagctgttttttaaaactaatacataatgaccagttggactttataccaaaaatgcaaggctggttcacccctagaaaataatataggccgggcacagcgactcacgcctgtaatcccagcactttgggaggctgaggtgggtggaccacaaggtcaggagttcaagaccagcctggccaacatggtgaaaccccatttctactaaaaattaaaaaaaaattagccagacatggtggcgcatgcctgtaatcccagctacttgggaggctgaggcagaagaatcacttgaactcaggtggcggaggttgcagtgagccgagattgcgccattgcacttcaacctgggtgacagagtgagactctgtctcaaaaaaaaaaaagaaaataatataattcaccttatcagtagctgacagggcaaaaattagacaacaatccccctgaattctgaaaggcatttgataaaggcatctaaatttgatatatatatatgtgtgtgcttatatatatatgtgtgtgtgtgtgtgtatatatatagtgtgtgtgtactctatatatagtgtgtgtgtgagtctgtgtgtgtatacaagaatatatatatatacacacacacaaaatagatacttccagacgtaatatttatacagttgctccttgatttaccatggggctaggtccaaataatccattgtgaatcgaaaatattgtatgtcaaacatgcatttaatgctagtgatatgatggttcatcttagaattttttgacttaagaatggcacaaaagcattattcaatagaaattataatgagttaggattaatgatttagtagaaatcgtaatcccattgtaagtggtaaggagctctttgacttataatagggttacatcccagtaaacccatcagta

SEQ ID NO: 93986 - DNA, 12732 bp, Homo sapiens
taatcaatttcaccacataaagtctgccaatttgagcaatgtactagccaagtggagaagggggctaagagtttcactttcaatatgtagattttcatttaattgtcctcttttcagtaagaggtttagtctctccagagagcaaatctcatgtctactcttctgatagcaaaagtatagttgcctgactggttgatgtgggaagggttctggatgtttatctgttttctatatagtcaacctgttttcagcccaacttttagaggtacctgatatctcaaatttatgagcctttttggggtactgcaatacaagtaaaatttacttttactagtttaagttttgacttttctggtctgctaaatcatttaccacttaattatcttcccacctttctggttctcttttttggaaaatatgttgtgtcaatcttttaatattaataataattgattcataattattgatttttatagataaaaatgaataattctaatattttcttcctatcccgattgttttgcccaatttcttggggtttatgcagcataatttgtgctatataataatatagtgttatatattatgacatatatatatgctatgaataatataatgttaacttacttcaaagagaacagaatacttttcctccgttacctggaggcgtcatatacttactgtaggcaaaaggaccacagtttttttcaaagtgtggtccacagaacacttgcatcagaatcgtctggcctttctgttaaaaaatcagactcctaggccccacttaaagcctattgagttaagaattcttgagtgtgggccctgggaatctgaatttcaacaaatgtctccagatgattcccagccactctaaagtttgagaattcttattccagtgttctaaaacttcaaacttactatatgatggaaatcttcatagagttcctttttgcttgttctcctgtacttctcatgtagtttaagagaaaaaaataacgtgtgagacagaataaaagaggttgggggaagttagatagctagttgttagattagaatgagtgtagggagttcagaaatcgggaaatagaaaacatctacaagttggcagaaaaagagtggttatgtgtagcaagtctggcttaggaaaaaaatactccctttatatttatatgtgagcatatttcattgtaattactttttcctgttattactgaaaaaacatgtaagtattgagggaattactcctatatggatgtcaaggtataaaaaagcaatagactttatcagatgcctttaagccatgagaaatatatatttctatgatgtttaccatttattaataaaaaaacttaataagcttaaacaaaaaattaagaaaattttcaagcttaagaaaggcccaattcaattgaaataacacaatataatggtacgattgcagaatgttcacacataaattagtaactatggcagcagagattttcccaatagtgtgggtaaaataatttagagagtatcttaagagattcaaaaaggagaacctggggtagcaaaatttgattaaggatgctcaacatggattccgacagaggaggtcatgcataattagtatgttggaacttctttaaagagctttttatgaaatatgaagaaaagtccattgatattacttgttatttaaaaattaggctagttttttaaatcagagattaatatctgattaaaaacacaaaagaagagttttaaaaatatggaatttgataatatggtttattcttaagattctatgaatagccagttgccttttcattatttaatgtgaatttctatatataattgagttattttagaatattataagtaattatttatagtcagaatttttttaaaaatgaaattctaaaaaaagcaaaaagaaaaaagaatgtatttaatggaaataaaaacaaatgagaattatcagtctaaagattcatttactttactgatggtagttaaggatagtccttaatattatttaggagcagttaagacattaacatggccgggcatggtggcttatgcctataattccagcaccttgggaggccaaggtgggcagatcacctaaggtcaggagttcgagaccagcctggccaacatggtgaaaccctgtctctactaaaaatacaaaaattagctgggcatggtggtgggtgcctgtaatccaagctacttgggaggctgaggcaggagaattgcttgaaccttagaggcagaggctgcagtgagccaagatcatgccactgcactccagactgggtgacagagcaagactccatttaaaaaaaaaaaagacataaacatgatattaaatttgaaagttaaaatgtatttctgtgttttttattaaaattattttatagtttttatatgtacattttatattttaacatattttaattgttaagaacatataacaataatggttaccttgaagcatttattagattagtgtccatgcataccttaccattaaagaatctttgatgaactttatcgagtttctggacattagaatcacaggattttatgaagtcttctagtcaagctactcaaaaaactgaaacttagacaagctgactgccatatccaaagtggatcaagtgaaatagctagtactataacccattttctgatgtttaagagcaatattatttattattcaaaacttctcttaatattactttttcttaaattttaattcctaatgtgtcctgtcttaaaaataatttaacataaccattatttcctacttggagtaattagtatcagactggccattccattctatacaactgaaaaactggacaaaatatgtgacaacaatttttaggtattagacaacaggaagcatcagctgtaatgcctaagagaaggggaaaagttgaagtgagtcctaaagttcactatgtctttgtacctggaggcaatttatggatcgtagtagagagagagagagagagagagggagggaaagagtgagagagagagaagagagaatctgagaaaagcacagtgtttcccataaactgaagagaaagacatcaaagttctaggtagctgaaatttgcagggcaataccataagagggagctatttgtagaatagttctcaaattttgtgtaagcatcccctcatgtctttggctgactattaagttgcttatgcatagggtgaactccacaaggtctgacacaaacaactgccaggaaaagaacagctaattaggatgtaaaagggaaacaagtatgggagtatgtgcagggtaaggagacatttgcattttgaccagttggagaggagaggtcttgttgagcttgttaaacaaattcatgaagattccagtaaagataatttatatccagaagaaaagttgatcaatagaaacagaccccaaaatagagttaacagaaaaagacatttaaacagtgattataaatatgttcacgtattaaaaaaaaacatgaatataatgcgaagagaactggaaacttaaaatagaaccagtggaacttctagttctaaaaattacaatatcttaactgcaaaaaaaacaaaaaacaaaaaaaaaacctgggtttaacagcaggttagatattagagaagaaaagatccgtgaacttcaagacagggcaataaagctatccaaactgcagtgtagagaagcagaaggaaaaggctgaaagcaaggactgagtgtcattaacttgtgggatgatatcagtgagtctaatagacgtataattggagccctagaaagactgagaaggctgtgaatatttgaagtaataatggccagaatttttcctgagttcttggttcatggaaaacaacccacatatctaagaagctcaatgcacctctggtagaaagataaccagattaaggacataaatcacattgctgtaagcagtgataaatagaaaagcttaaaagcaaccagaggggaggaaacacattaattacagggatacatatgtaagaataaaagctaacttctctttagaaataatgcaagacagaagatagcagatatctttaaagtgtagagagagataatatgtttaaagcgctgaaagaaaaaactggttatcttattattttatattacatgaaaatatctttaaaaaaaatcttcgaaataaaagcattctcaggcaaacagaatatgaagcacatgtgtccagcagacctaaactataagaaatattaaaggatatttttcactggaagaaaatgataccagaaacaaatttgggtatgcacaaagaaattattttaaatgtacctggtacattcacttttatagaccctttgctgcttattgagccattcccagtacatttaaaaggattaaaattattttaagtatgtttcctggctgcaaaagaattaaattagaaataaataaccaaatatatcaggtcactcattctccagctgtggagagttgtttaatgtagacattaaactccctttcatgtatttatcttaattgattatatttaaaattatatatattatcctttaatagacattatatatattatctttgatagacattaaactccctttcatatatacacctatcctattaatcttgtccttctagatatagaactctaatacaacataaattaccaaaactgagacagaagaaaatttatatctcaaaatctctctatgtattaaataaatcaaatttataattaaaaacttttcaaaaaacaaaattccaagaccaaatgatctcattgttgaattttatcaacctttcatgagaaataatatcagttgtacacaaaccttttagaaaatagagaaaacaggaaaacttccccctcacatgatgagactagcattataaagacattactagaaaagaaaattcataccaatatcctcctaatcatagatgcaaaattccttcaaaaagtattaacaagtcaaatccaacaatacatcatgatcaagtgagttttatcccaggaatgcaaagttggtgtattagtctgttttcatgctgctgataaagacatacctgagactgggcaatttacaaaagaaagaggtttattggacttacagtttcacatgactgaggaagcctcataatcatggtggaaggcaaacagcacgtctcacatggtggtggcaagagggagaacgaaagccaagcgaaacagtttccccttatcaaaccatcaggtcttgtgagacttattcacaaccacaagaacagtatgggtgaaactgcccccatgattcaattatctcccactgtgtccctcccacaaaacggaattatgggagtacaattcaagatgacatatgggtggggacacagagccaaaccatatcagttggtttaacaacagacaatgtagttgaccaccttaagagaatatggaaaaagccatatgctcatttcagtaggtattggagaggaatttgacaaaatttaatattcacttattaaaaaaacaaaaaaaaattttcatagcaaacttgaaatagaagggaatttcttcaatctggtcaagaatgtctactaaacactgatttaactacatacctaatgatgaaagactgaactgttttcctcaagatcagaatcaaggcaaagatgtcctctcttttcatttcagcttaacatgctattgggggccctaccctgtgataaggcaagaaaaaagtagtaaaaagggtataaatttgaaaggaagaaataaaaactattttatttatagacaatgtgataagaacatcaaataccttaaagaacctacataaaagctagtagaactaaggaatacattcagcaagtttgcaggatacaaggtcagtgaaattctatatgctagtgacaattagaaagtgaaatttaaggagaatgggacgtctagcttcagagcgggaaccttcgttgtgacgaaaaagggaattaaatatgggtgatgttgagaaaggcaagaagagtttttgttcaaaagtgtgcccagtgccacaccgtggaaaagggaggcaagcacaagactgggcctaatctccatggtctcttcgggcagaagacaggtcaggccattgtattcacttacacagatgccaataagaacaaaggcatcacctggggagaggatacactgatggagtatttggagagtcccaagaagtacatccctagartaaaaatgatctttgccggcattaagaagaaggcagaaagggcagacttgttagcttgtcttaaaaaagcyactaaatgagtaataatttgccactgccttatttattacaaaacagaaatgtctcatgacttttttatgtataccatactttaatagatttcatacaccagaattcaggtcatgaatgactgacagaatattttgttgggcagtcctgatttaaaactaagactagcttctggttaaatgaatatgttcagtttttgaattttaatagtaattcgaattcagtaaatgctatcactgtttaccccttctaaagctatgattagacttcattaataattttcaccttttcacaaagatggtgaatgccatcttaaaacttactggtgattggttttatatttagatgtatgtaactggttatgtgaatatatttaaatactggggaaattccttcactgtctcagaaccaagcaagattcacctgtgttttgtgttcatttgcctcttaaaggcaagggttgaagataaataaggtagcaacgtctactttatatttttggccctaactatgccaatctaattagaattccctgtatttaaaatggttccttttacttactgaaaggaattttagtgtggtttatgtgtaatatcaaaggttatttaacacttctcacattttatagatgatctatgaggtcatatgcttttaaaatagcaagtttttttatgtttaaattgagtttattttaggcaggcaaaattgatttaatgtttgagaaataattttatgtaattcctattacagaataaaaaattacagataatcttttattattattattattttaatttattatactttaagttctgggatacatgtgcagaacgttcaggtttgttacttaggtatacacgtgccatggtggtttgctgcacccatcaaactgtcatctacattaggtatttctcctgatgttatccctcgcctagccccccaccccctgacaggctgtggtgtgtgatgttcccctccctgtgtccatgtgttcccattgttcagctctcacctatgagtgagaacatgtggtgtttggttttctgttcttgtgttagttttctgagaatgatggtttcatccatgtccctgcaaaggacatgaactcatcctttttttatggctgcatagtgttccatggtgtatatgtgccacattttctctatccagtctatcattgatgagcatttgagttggcttcaagtcttcgccattgtgaacagtgccacaataaacatacgtgtgcatgtgtcttataaacttcactcttgaactctttacaatctaagtcaaactaagtaataatttaggattgtctttaaacagccattcagaaacataaaactgtagaactgctgtgtatttgtgatcgggaatagtgcttttgccaacttaaaaggattaaaatagaggagatatacacacacacacacacaaaaaaaagaaaatgaaatgtaaaaatccaataccacaacactcaaacacatgaaatacttaactattcatttaacacaatatgtgcaagacttatacagtgaaaacaacaaataattgctgagagaaatgaaagaaggtccaagagatataccatgttcatggactggaaacttcaaaattattatgatgccagtttcctgcaaattgatctatatagtcatcacaatactcaccaaaattcaaccagtcttttctttgaggaaaggggcataaattggcaagatatttctaaaatatacgtggaaatgctagaaatgcaaaggaattagatagccaaatcagttttaaacaggagcaaatttggaggatttatactacctgatttcttttaaaaagttgtattttagtatgtatttattattattgttatttattttttaaattgacaaataaaaattttatgtatttatggtatactacatgatgatttgaaatatgcctacattgtggaatggagaaaccaagctgattaacagttgaattactttagatacttatcatttttttgtcataaaaatacataaaatctgctttcttagcaattttcaagtgtataatatactgttattaactatagtcaccatgatatacaatcattctcttgaacttatacctcctgtctgactgaaattttgtgtactttagccaatatcttcccagtcctcccactcccactgcagtctcctgtaatcaccattctactctctgcttctgtgagtttgactttttttgttttcacatataagtgaaatcatgtggtatttgtgtttctgtgcctggcttatttcacttaacataatgccctccaggttcatccatgttgctgcaaatgacaagagtttctcctttttaaaggaggaatagtattccatttacactacctgttttcaacatctattataaagctaaaataatcaaaacaggatgatatgggaataagaatacacataaagggcaaagaaacaaaatggagagttcagaaatagacccacacatacatgggtaaatcattcttgatagagtgattcaatgggggaaaagacagtgtttttgataaatattgctgaaacaattggatatttctgtgtgataagaacttacctcacaatcattcatgaaaattgatttaaattgatcacagatcttattataaagaacaaaactatactaattctcagagaaaacgtgggagaaaatctttttaaccttgggtaggcaaatatttcttaggacacaaaaaatatgaacaaaaaatgattatactttgtctgaatcaaaaaacttttgctcttgtaaatacagcattataaaaatgaaaaggcaagccacagaatgagagaaaatatccagaaaacacgtacttaacaaaaaactttggttgagaatatataaacatttctgaaacctcaacagtaagaaaacaaacaatacaaaaataagtcaaaagatgtgaatgaggcattttactaagaagacatagaaatcaaccattagcacatgaaaagatgctcagtattattaatcatcgaggaaatgcaattaaatccatggagttaccactatacacacattaaaatgactaatatttaaaagactgacaataccaagtaggtgaaaatgtggagaaatagcaaatcttatatttagctgataagaatgcaaaatgacgcagccacttggcaaaacagtttgatactttcatataaagttaagcttacacttaaatacaatcctgcaatctcatttttagatatataccaagataaataacatatgtcaacacaaaaacttctaagtgaatgttcatagttgttttatttgcaattagccaaattacagacagtaaaaaagtccatatacctgtgaatggataaaacattattatatatttatgtcaaggactatttttcaacaataaaaaggaacgagcattgtggtaaatgaatgaaaccaggtacaaaatattacatgccatgaaattgtagaacagacgaactattctctagtgaaaaaaaccagattattggtgacttagggccaggagtattgagttgtaattggaaaagaacatgaggaattttggaaggtggtgggaatattctatatattcactgtggtagttacatacggatatacattgttctacctgcatcaactgcacctacttaaaataggtacagtttatttcatgtacattataaatcaacagagtagattttaaaaacaaaaataataatatgattagaattgtaatctggttcatttaattattcttaagaaaatttcctctggttatctacttctcattcacattctaaaaataaaataccaaaacaccacagaacacaaattcacgagaaatagctgccttttcaaatcatatttatgttcattactagtgcaagcaaataactagatttggtgtacattctttcacttacctttatgagaataagacaaataacaggccagcatatttagctctaggattttattcagaaaagtacctttaaggtacttaatgagatgggtacaaatttagcccaatcttctggcattttctggttaacataatgataataattttgattataagtcatttttgtaaaatgctggcctgagcagagacttatgcatggcattttattacattttaattcttggaaaattcataaactatttgacagcctttcagttagcaaaaaaaaaaattctataaaaacagattccctttctcaaaataatcataataaatggtagttctcttctactgagcaagtacaattaattgccaaaggtgaagtatttttagtaatccaaatgattagtttcacaattatccattcattttcataattttcagcttgataaatttcatctaaaattattccctagatttttaattaaatggtttgctttttaggtttatatagtgaatactgttgtaatctatttggtatacaaatactcactgaattagctgaatagattttcatcatttgaggaacatgggaccaaaaaatgtatttttctgtcagttaggatgacattagctgcaaataacagattcctgattcaaacagacttaagcaaaaaggaaggaagaaatccagaggtagggcagcaccaaccatagtatgacagaattccagctgtgattgctacagttttctggagtttgtactctttcatatgttggtaacaagatggctgcacagccaggtataactatatacagaggcacaaaaggaccatctcgtctctatgaatgattagcctttcccagaagcccctgcttatgtctcattggccagaactgggttatgtgtctatcttaagccattcactgacaaggggcgtgagactacaataggtaatttagacacatcaagataattgtagactgggcacagtggctctttgggaggccaaggaaggcggaacacctgaggtcaagagttcaagaccagcctgaccaacatggagaaaccctgtctctactaaaaatacaaaattagccaggcgtagtggtgcacacctgtaatcccagctattcgggaggctgaggcaggagaatcacttgaacccgggaggcagaggttgcagtgagccgagatcaagccattgcactccagcctaggcaacaagagcgaaactctgtctcaaaaaaacagaaaagcaaacaacaacaacaacgacgacagaaagataattgtagtcttccttgagtcaaaagggaaaagagtgtatacctaaacaaaatcagtatagtaaggatgaggatggagaatggatattggataggcagccaacagtgttactacacatgtgaagaggttttcttattttatttcctaggacttgcaaaaagtcagtgctctggtactaaaaagaattggtttatttgaaaaaaattcttctggaattatgcatactttacagcataattttataaaagcagtcagaattttttgctagcttatcagaatcttgatcaaaagatatttatactaaaatgagtttaaattagaaataatatatattaactcttttattcattaattcaaaatattttttgactactaatgtctgccaagtacctggatatggtggtgagcaaaaccaaccatggccttgttctcatggaacttttagtctagtggtggacaaagagatttgtaaaataaagacgggtgtggtggctcacacctgtaatcccagcactttgggaggcttaagcaggcagatcatgaggtcaggagttcaagaccagcctggcaaacatagtgaaaccctatctctactaaaaatacaaaaattagcttagcatggtggcatgtgcctttagtcccagctactcgggagactgaggcaggagaatcacttgaacctgggaggcagatgtttcagtgagcagagaccatgccattgcactccagcctggctgacagagtgagactctgtctcggaaaaaaaaaaaaaaaagacatttgtgaaatgatcatatcattaaatgtgtgtggagtaggtggcataaggaaggcttctttcctttcctatgaggctactctcccctttcatatgctgacctttcgattcctggaatacatcctgcttgctctgccatggagccttttcatatgctatgttctctgaaatagttccccactctcaatattctccacttgtttccagataaatccagtttatctcttctcagaagccttccttatgccacctactccacatgtaatgatatgatcattttataaatgtctttatccagcactagactaaaagctccatgagaacaagaacctggctggttttgctcactgccatatccaggcacttgggagatattagtagtcaataatattttgaattgatgaataaaagaaacatatcaatttgggagttgtcggtatgtaaatggaa

SEQ ID NO: 93987 - DNA, 12427 bp, Homo sapiens
gctgaggttgagaaattctgcattggaaggaacagtgtgcagggcacacagagggttcctcccaaattcttgagtggaaaacctcataattcacagggcatcaaggagaatagcaaataatagggaaaatttacccaagactaaatactgttttagttttatttaacaaagcataaagccacctccatcctaacacacacacacacacacacacacacacacacaacagaagctatttccaagtaactttaccacattacaaaagacatctcaagaatattttcagaaatatgaaacaaccagtacaaaacaaagtaaaatgtgtattgtctgtaatccaataaaaattatatccaagctaatgtggtaagacaacaaagggaaataaaaggcatacaatttggaaaagaataaataaaactgcttttcctcacaatggcatcatttttaaaaattgacaaaaaactactcaaaataataagtgattacgaggttgtagaatacaagattaatatacttgattaatacaaaagtcacttgcttttctgtatttcagcaatgaacaagagtaatttgaaattaaaaacacaatttcttttacagtagcaacccccaaaataaaatatttattgtattaacctaataaaatacaagatgtatacaagggaagctacaaaactctgttgaaagaaatcaaagaactaaacaagtggagatgttttacattcataaataggaagacataatattgtcaagctgtcaagtttttcatacctcatccatagattcaataaaatcccaaacaaattaccagcatgttattttatgtatatcaagaaactaattgtaaagtttatagagagaggccaaaaacacagaatagccaatgtggtattgaagaaaaagaacaaagttgaagaacaaatttcaagacttactatcaaactacggtaatcaagacagtgtgatattagtgaaagaagagacaaatcgatcaattgaacacaatagagaacccagatatagactcacatgtatatagtcaattaattttgacaaagaagcaaaagcaatacaatggagaaaagagagaattttcaacaaatcaaatggtgctggaagatctatatacaaaaaaaaaaaaaaaagaaaacaaacaaaaaacaacctgagcatatcttgcacccttcacaaaaattaactaaaattggatcagataactacatgtaagatgcaaaactataaaatttttagaagataccatagaagaaattctagatgatcttgggtttggcaattactttatttatacaatgtcaatggcattatctatgaaagaaagaactggtaaggagaactttattaaaattaaaagacactgtcaagataaagaaaagacaagtcacaaactaggagaaaagatttgcaaaggacacatctgataaagtactattatccaaaatacacaaagaacctgtaaaatgcaacaaaaagagaacagcaacccaattaaagtgtaggtaaaagatctggacaggtacctcgccaaagagatatacatacagcaaatacatatataaaaaaaaatgctccacatcatgtcatcagggcagcgtgaattaaaacaacaataaaataccactgaacatgtattaaaagggcccaaacccagaacattaacaacaccaaattctggcaagaattaaaagggcccaaacccagaacgctagcaataccaaattctggcaaggatgtagagcagcagaaattctcatttattgctggcaataatgcaaattggtgcaaccacttttgaagacagtttatcagctttttacaaaactaaataggctcttaccatatgatccaaaaatcaaactcttaagtatttattttaaaaagttaaacatttatatctacacaaaaacctgcacacagatggttatagcagcttcattcataattgccaaagcttggaagcaaccaacatgtccttcagtaggtgaatggataaataaactctggtacatccagccaatggaatgttttttccatgctaaataaaagaactatcaagctattaaaagacatgaaggaacctcaaatgcatattactaggcaaaagaagctaatctgaaaaagctacacactgtatgagtacctgtatatgacattctgaaaaagacagaactatggatacagtagaaaggtcagtggttcctagaggtaggggaagggagggacaaataggcagagcatagcgggttttcagtgtagtgaaaatactctgtatgatattataatggtagatatatgtgattgtaaatttttccaaacctgtagaatttacaacaccaagagtgggccttacataagctgcagactctgagtgatgatgtgtaaatatagaggaatcaattgtaacaaatacatcactctgatggaggacgttgataatgagggaggttgtgcatgagagagaacaggaattctataagaaatctctgtaccttctgctcaaatttgctgtgaaactaaaactactctaaaaaaacaaaatctttaaaaaattactcagcatttaaaaaaatagaaaaataagactcatgaagaagaaaaaaatcaattcatgggttgatgggtatagcaagccatcatggcacatgtatacctgtgtaacaaacctgcacgttctgcacatgtattccagaacttaaagtataattaaaaaaagaaaaaaatcaattcattaaaattgggccagaaatgacatagatgacagaattggcagtccaggctttaaaataattattgcaattatatttcatgtattcaagaaactagaggaaaccttgacatgaaaaacatgtcaactagagagatgaatgatcattttagacaggcccaaattgaatttctagagaataaaattacaatttgatacaaaaattacactggaagcaattaacaacagttggacattgtaggagaaaaaactagtgaacttgaagacttagtactagaaactatctaagaaggtacaatagctacaaaaaagcaaaatacatagagatatacttagccatggaggcaaaagatctctataaggggaactacaaaacactgaagaaagaaattatagatggcacatatagaaaagcattccatgcttatagattcaaagaatcaatatcattaaaatggtcatgctacccaaaacaatctacaggctcaacgctattcttatcaaactaccaactcatttttcacagaattagaaaaaagtattctaaaattcatatggaacctaccgggagtccaaatagccaaagcgatcctaagcaaaatgaacaaagctggaggcatcaagctacctgacttcaatttctaattcgttgtgtctggtatataaaaatacaattgattttttatgtgttgattttgtacctacgacctttctaaattctctaattgcttattttgtctatcccatcagattttctacattgactgtgatggtgactgcaaataaagacagttacttctttttatcaaataaagatgacaaccatttctttaactttctctattgcattttgtagaacctccagtaaaatactgaacaaaggtggagagagtggaaatattagtctattttttttattttagggagaaatcattcaaactttcactaataaacatgatgttagctatatatttaactgtcctataccggatgaagacaattctaacttatttctagtttgctgaaagtatcctgtaagtctacagtaaccaaaacagcatagtactgatacaaaaatagatacaaagaccaatggaacaaaatagagaatccagaaatgaagctgcacatctacagccatctgaccttcgacaaagatgataaaaataagcaatgaagaaagaactccctattcaaaaaatggtgcggcagagctggctagccgtgcacagaagaatgaaactggacccctactttcaccacatacaaaaattaactcaagatagactaaagttttaattgtaagaactcaaactataaaaatcatagaataggtccttcacatcccttgtaagttggattcctaggtatttcattctctttgaagcgattgtgaatgggagttcactcatgatttggctctctgtttgtctgttattggtgtctaagaatgcttatgatttgcacattgattttgtatcctgagactttgttgaagttgcttatcagcttaaggagattttgggctgagatgatggagttttctaaatatacaatcatgtcatctgcaaacaaggacaatttgacttcctcttttcctaattgaataccctttatttctttctcttgcctgattgccctggccagaactcccaacactatgttgaatagcagtggtgagagagggcatccctgtcttgtgccagttttcaaagggaatgcttccaggttttgcccattcagtatgatattggctgtgggttcgtcataaatagctcttattattttgagatacgtcccatcaatacccaatttattgagagtttttagcatgaagggctgttgaattttgtcaaaggccttttctgcatctattgagataatcatgtggtttttgtctttggttctgtttatatgctggattacatttattgatttgcgtaccactgctcaacaaaataaaagaggacacaaacaaatggaagaacattccgtgctcatggataggaagaatcaatatcatgaaaatggccatactgcacaaagtaatttatagattcaacgccatccccatcaagctaccaatgactttcttcacagaattggaaaaaactactttcaagttcacatggaaccaaaaaagagcccacattgccaagtcaatcctaagccaaaagaacaaagctggagacatcacgctacctgacttcaaactgtactacaaggttacagtaaccaaaacagcatggtactggtaccaaaacagagatatagatcaatggaacagaacacaggcctcagaaataataccacacatctacaaccatctgatctttgacaaacctgacaaaaacaagaaatggggaaaggattccctatttaataaatggtgctgggaaaactggctagccatacgtagaaagctggaactggatcccttccttacaccttatacaaaaattaattcaaaatggattaaagacttcaacgttagacctaaaaccataaaaaccctagaagaaaacctaggcaataccattcaggacataggcatgggcaaggacttcatgtctaaaacaccaaaagcaatggcaacaaaagccaaaattgacaaatgggatctaattaaactaaagagcttctgcacagcaaaggaaactaccatcagagcgaataggcaacctacagaatgggagaaaatttttgcaatctacccatctgacaaagggttaatatccagaaactataaagaacttaaacaaatttagaagaaaaaaacaaacaacaccatcaaaaagtgggcaaaggatatgaacagacacttctcaaaagaagacatttatgcagccaacagacacatgaaaaaatgctcaccatcactggccatcagagaaatgcaaatcaaaaccacaatgagataccatctcacaccagttagaatggtgatcattaaaaagtcaggaaacaacaggtgctggaaaggatgtggagaaataggaacacttttacactgctggtgggactgtaaactagttcaatcattgtggaagacagtggggcgattcctcagggatccagaactagaaataccatttgacccagccatcccattactgggtatatacccaaaggattataaatcatgctgctataaagacacatgcacacgtatgtttattgtggcactattcacaataacaaagacttggaaccaacccaaatgtccatcaatgatagactggattaagaaaatgtggcagttgtggcggttgctggtcagtaacagccaagatgctgtggaatctgctggctcttcatcagattgggcagaggaccataagcactgcttcccacaggcattttaaaaataaagttccagagaaacaaaaactgttccaggaggatgatggaattccactgtatctaaagggtgggatakctgatgccctccttcatagagccaccatgattcttacagttggtggaacagcatatgccatatatcagctggctgtggcttcatttcccaataaaggagtgacttcaatcatcccagcaatcacttggttcacattcattcagctctctatggaccagaaatctgataaatgagttcktcyttggggatcaatatttattgacttgtagtaactgccrccaataaagcagtctttaccatgaaaaaaaaaaaaagaaaatgtggcacatatacaccatggaatactatgcagccataaaaaggaagcattcatgtcgtttgtagggtcatggatgaagctggaaaccatcattctcagcaaactatcgcaaggacaaacaaccaaacaccgcgtgttctcactcataggtgggaattgaacaatgagaacacttggacacaggaaggggaacatcacacactggggcctgtggtgggattgggggatgggggagggatagcattagaagatatacctaatgtaaatgaccagttaatgggtgcagcacaccaacatgacacatatatacatatgtaacaaacctgcacgttgtgcacatgtactctagaacttaaagtacaataattaaaaaaaacaataaagcaggctaaaaagggaaaaaaaatcatagaataaaacctagaaaacaccactctggacataggccttgggaaataattcatgactaagtcttcaaaagcaattcatcaaaatctaacattgacaagtgggaactaaataaactaaagagcatctgcacaacaaaagaaactgtcaacagagtaaacaaataacctacagaatgggagataatattcacaaactatgcatctaaaaattataatatccagaatctataaggaacgttaacaattcaataagcaaaagaaaaaataaccccattaaaaagtgggcaaaggacatgaacaattttcaaaggaatacatgcaagcagcaaacaaacatatttttaaaatgctcaacatcactaattataagagacatgcaaaacaaaaccactataggagagcatcttacaccagtcagaatgggtgttacaaaaaagtcaaaaaattacagatgctggtgaggttgcagagaaaaaggaatactaatacaccattgtcaagaatatagattaggttagccacagtggaaagcattttggatgtgtctcgaggaacttaaaacatacctaccatttgacccagcaatcccattactgggtatatacccaatagaaaataaatcatcctatcaaaaagacacatgcacttgcgtgttcatcacagtactattcacagtcacaaagacatgcaatcattgtaggtgtccatcaagagctggctggataaagaaaatgtggtacatatacatcacagaatcctatgcagacataaaaaggaatgaaatcacattctttgcagcaacatggatgcagctagaggccattatcctaagtgaattaacaggagaacagaaaaccaatactgtatgttctcacttataaatgggagcaaaacactgggtactcacgaacataaagatggaaacaatagacactgggagctactaaacatggagagggagggaggaaggcaacggttgagaaatgaactgctcactatctgagtgatggaagaatctgtatctcaaagttcagcagcatacattacacctatatgagaaacctgcacatatacccctgaacctaaaataaacgtgaaaattataaaaaggaatttgaaatgaaataaaataatagcatctacagtagcatgagaaaatataaaatgctttgcgaaaaatctaacaacagttatgtaagacctgtggactgaaaactacaagacatttactggcggaaataagaaaacctaaataaatcaagagatacagatattcatgtgactaagaaggagtaattattcttcagagtaggtagaaaaattaattattagttaattattaattcataagaattaatattcttaaaatgatcattcttcccagtttaatctgtagtttcaaaataatctcaatcaaaatctcatcagagattttgtataaattggcaagctcattttaaaatacatatggaaatgcaaaattcttaaaacagctaacaataaacacagtttgaaaaaaaagaacaaagttggagaactacacgacatctaaaattattataaagttacagcaatccagacagtatggtactggtataaagatatagatcagtggaaaagaatagagtccgcaaaaaagaaaagtcccaaatgtatatggacaactgattgttgacaaaggtgcaaaagatactcagtagataaatgatttctgcaacaaatggtgctgaaaattggatagttgtgtaaaaaacaacttcaatctatatctggcactaagaattgctcatacacaatgtaaaatctaaaactacaaaatgtgcagaagtaaatacaggaaaaaaactgtgattttttattagaagatgtcttaaatacaacaaaagcatgattcataaaaaaaaaattggtattttgggcttcataattttaagaacttctgctctgttaaagacattgttaagtgaataaaaattaagctacaagctgggagaaaaatatttgcaaaacatgtatccggttagtgacttgtgcccagaatatgttaaaaaaaaaactctcataaccaaataataagaaaatagacaactcaattaaaaatgagcaaaatatttgaatagacagtccatgaaagaagatatatggatggcaagtaagcatatgaataaaatgttcaacattacattagtaatcactaggaaaaggaatattaaagccacaagaagataccattacaaacctattataacgcctataatccaaaagtaatggtgaggaatgtagagaaaatggaactcattgctagtggaaacataatcactttggaaaagagtttttggcatttccagccaggtgcagtggctcaagcctgtaatcctagtactgtgggaggctgaggcaggtatatcatttgaggtcaggagttcgagaccagcctggccaacatggcaaaaccccatctctactaaacaaaattaaaaataaaaataaaaataaaaataaaaataaaaataaaaatttagccacatgtggtggtgcacacctgtagtcccagctactcaggaggctgaggttgcagtgagctgagatcttgccactgtattccagactgagtgaaagagcgagactgtatcaaaaaaaaaaaaagagtttgacatttatgtaaaatgataaacacatgcctatcatatggcccatcctttccattcataactgttttccaaataaatgaaagtatatttccataaagatgtgtacacaaatgtgtgcaactgtatttacaacaccccaaagatgaaaacaacccaaatgtctattaacaggcgaatgaataaataaattgtatacgcaaacagtggaaaatatccagcaatctaaaggaatgaaccattaatatacacaataataggaatgagtcccagaaataattatgctgaaagaaatcagacaaaacagtatccactgtaattttaacctaaaattccagaaaatacagactcttcatctatataaaaagaaagcggatccaggattggcaggcgtgagagatggatgggtagggctgagacagaggatcatagagcagtgtggggacatttggggatgatgaatacgcacatcattttgattgtggtgatggttttacacatatatctatatctttatcttaacatattttacagtttaaacatttgcaattgatcgtatgtcaattataccttaagaaagctattgtaagaaacattttcctagcttctgtgagatgctacacagacctgtaagccctcttatgaacgtgtcctgctgcatagctcatgttccctttaaactcatcatagaaaggatgtattaaaactaaaattatgtggcacaaagtcaaaggatgtagttaaagatgataattttatggtcttgaggggaactactataaatgcagacactaaacaacagaacgatagttcctagaatatgactaagtttaaaatcacaggaaataaaaggcagaaatatcattaaatctgactacaaactgatctgcaaattgaaaagcagaatcaggaaatggtaaatgtcttaatgtgttgcttttctctgccttttgaatgaagatagccaaattacaaattttttgaaaaggctgtaatttcaactatgggggaaacctaaacatagtcatttataagtaactgagaaagtggttagaaagagattgaatacttgaacatattcagagttttctataaacagcaaatccacagattataaagagggctccaagcataatgtgagcttgcccttgtaaatttccaagtagtgaaggaaatttcctggaccattaatctatttttgtgcaatgaaactgtgtttattcctatggaaactaatggaagacaccccggaattgctacagataaaatatctggatgaatttataaagcacttgccagtgcttgaagccagagtctggaggacaggagtctccttcacagttttgttttttgtcttgtatccaatgccaaacataggcatactggtgctactcaacaaatcttggctaacttatgttttgtttttttatttatttatttatttatttatttatttatttagaaatcattgcagaacctagtttttagcacactgagattttatatcaggaaatttaaatttaatttttaaaaaacttgtcgggcagtatatttctgctcctccatcggtgaaattaataaagtgagtacagcacaaagacaacacaacagaaaccaaacacaagagaaaccaaacacaagagaaaccaaacacaagagagtcatcaccaagacaaccagaatcgaggggcttattgggacagatactaacaagctatggagtcaaagcatgacagaaaagcaatagaattatagagaaggcaaataacctccaaattagtaaatcaatccgatgcaaagattcgcaagcccttcataattccaaggtattgcactacttagaaaagcgataatgcagagcaaagaatagatgcaatagtcaaaaactaataagagaagaaactatatcagtaatagtggtgaaattgctaaagggcaatgagtagcaaagaaaagtatggagaaaagaaatctgaagaaaggttgtcaaaaagacgagaggacaaaacattctaatatgaagcatttgggaagcttagttgaggagtgaaggatgcttaatctgggcagccacatttcaggaaaattgattaaaaggccacactgcacattcgtagaaggttagaatagactcggactttaaataaattgtatttttaccctggaaccatatgtaaaaatgaattgcctagaaacataaacatgtaagtagtcagaagttaaaacactagaatcctcctaatttcttccttaccccatgcccaaagcagcttgtaaaattaattacaccctgcatgagtttcttagggccatcataacaaactaccatgaactgaggagcttcaaacaacagaaatttattctctcacagctctggaggcctgaagtctgagattaagagtgcaaggctgctctccccttagatgctctggccgggaatctgtttcttttctcatccagcttctggtggctacaggcattccttggtttactgctgtatcgctgcaacctgtgcctgtgtgcttagatttccttctcttcctctgtgttttctcctctgtgtcttttataaagacacatgtgattgcatttagggccccctcagattatctggcaaaagtacctcctcttaaattccttaatcatatttttgccatattagttaatatccttttgctgtgttttgcaatatttagaagttctgggaattgggacatatcttttgggggaaccattattcaacccacatcatatcagctctctgaaagaaatgtgtacatatatatatatgtgaatgtatatgtgtgtccatttatatatacgaatgttgctagtgtaatggaagtaaagttacaatttacaaataaaaatgaaatacagtagtttcccccctaaccatggttttgctttttgttatttcagtta

SEQ ID NO: 93988 - DNA, 12971 bp, Homo sapiens
ttatttttaaccccacatgggactgtctacaaactattttcatgttgagtataaaacagtcaaacctgtaactattttctttgtttcagaattggcctgcaaaacatctgctaattatttaccaaagctgaatctatgcaaactctacaatccagcaattccactcctggtgttaccagtggagggtcttgactacaagtcatccaaattcttggcgttttgaacaaaaaattggacaaaatgcacaaagaaagcaatgaaggaatgaagcaacggaagcacagatatatgtaaacaaaaattcactccacagagtaggagctggctcgaccaagtggctcaagagcgttggttacagaattttctggagtttaaaataccctccagagtttcccattggttacttggttacaccctgtgtaaatgaagacttggcctgcaaccagtctgattggtcacaagaagtgaccaatcagagggtgaagtcaagttacaaagttaaacatgaagacttggccccatgaccagcctgaatgattgcgggaggggaccaattataggtactcttcatttttcatctgcaaggcagtgcaaagggagtagcctcttatccttttgttacttgcgtgtagaaaggtggggttttcctttggattcagttctaggaagtcagcacaaatcagccttaggtttcctgtctccagaccctattctgcctcactgagtaaataccaaatagaaatgagcatgtgttcatctaaaggagaccttcagagtggtgcttacagccccaaatcagaaacaatgcaaaggccctgggctgggaagtgaattatggtagagtcacatggtggactactgcgctgcaatgagaaggagcaatcttcagaccaatccagggacatgaaaggatctcacacccattatrctgactgagcagaaagggtaggacaaagtaggacatacatatatcctgtatgatttgatgcttatgatgtttaaaaacaggctaactctaaccgtaaccctctgctcattaatgctttttgtttgtttgtttatttgagacagggttttgctctgtcgcccaggctggagtgctatggtgcaatcttggctcactacaacctctgtctcccaagctcaggggatcctcccacctcaacctcctaagtagctaggacgacaggtgtgcaccaccgtgtccagctaatgttttttatttttagtagcgatggagtttggtcatgttgcccaggctaccgaggtgtttttaattatctttctcttccctgccttgcctccccattcctcttcctcacctgtgcttcctagaatgacctcccaggtaatatccctgcaccagctcttgtctcagagtctgcttgcggggcctcgggaactgagacaatgcacaatttttgtctttgttatgtcagggatcatcatttggctccatctagcacctccatgagcctggggactttgtcttgttcactgatgtgtcccaagtgcctagaacagtgccaggcagattattgacactcattaagtactccttagacattgaagaaaatatgcagacatagccaggaggccaagatctagaaagcatcaagctgcccagaagctgtttcactcaagcaaaagggagcaaggtcatgttgatggaggcctgtggtgtgtatatgagtgtgtatgtgtatatgtatatatacatatgtatatatatattctgatctcacaatagctcttacaatagttattgtcttaacaacaaagatagggtaactgcttagttcttcgctgttgaagcttagtagaggcagagcatgtctgtcttatttccgctgtagccccagggcttagcacctagtcaggccatagtaggggctcaacagatatttgctgagtaaataaatgagtgagttcaaacatcttgcccaaagtcacggctgggaagtgttggagcttagatttgcacccagtttagtgtgagttcaaagcccaagttctctggctattccaggttgctgctccagtgtggatacgcacagagtctttaactgctgtccttgtccccactggctttctcatgagcttttcagatgaaaatgactattatttaaaaatacaaaagaaaaatcttcattgactggttttatgaagaaaactttataaagttatatatatatataaaatatgtataatatatatgttatataaggttttatacagaaagcgttataaagacaacttcttggtgtagggtgggcccagccagaatgtggccaaagggtggaccccatgactctcttgcccttcatctttaaattcctgatgggtatcagtgaaactcaccaaaccgtttacctggatcaacagacaaagaaaatggtgcttagctaggtgatctgcagtccagctttgcattctggtttaaatccacagacttaaacaaatgggacttaagaaggatgggcaggctgggcacagtggctcatatctgtaatcccagcactttgggaggctgaggcaagcggatcgcctgaggtcaggggtttgtgaccagcctggccaacatggtgaaaccacgtctctactaaaaatataaaaaaattagccgggcatggtggcaggtgcctgtaaccctagctacttgggaagctgagacaggagaattgcttgaacccaggaggcagacattgcagtgagctgagatcgcgccactgcactccagcctgggtgggtgaccgagctaaaaaaaaaagaaagaaggatggacagagggcagtgatggggatctcactggccagagacatctctctagtgctctatgctgacttgactctgttccaaactccctcaattgttcaaagagttgggcaataacagatgtgagtgggcactggccacccatggcttgtcttctccagagtcagtaaatgcacctgacacaattggctgttacctacgagtgtggtgtcatatagataggaaagagtgtcttccctagggctgtgagcagagccagctagtgctaggggactaggctgagtgtagcaggatgttggatgacatcttcaaattaggttatcgtgctcagatatggttttctaggtttatacggtcagaataacatccctgggagtgagagacctcatggagaccatgagaagtgttttgagggaaggtgagattggaagtggggaagacagttaaaaattagatgataaaacaaaagtgcctaagaggagggagcaagatgttaagcagacgtgttgggaaatgaaggaagtataagtgggagggcagatctgcctgagagaaccccatgagcaggtgaggagatggcctaagcccatggggaagcagatgaggggccctgagaacccctcagctattgcatattctcagtctttgcccaccaggtgacgtttcctcctctcaggtgaatgctgcatgctggaacgccctctctggcctgatttgttgcaaaggcccctgtcctgagatgggctccctttacatcctgattcccatcaaagcttcccatctcctctgcatcttgcttgctgtgtcactcagggtctgctccactgaggtgacacttacacctagggagggaccggggaactcgaaatcagccaagaagccagaagaggcatggatcagccagtccatctgaggaagggaattggaatcttggaagggagcaccccatacttctcctgtctccaactggtcagggatgcgccaatgcactccactcccaatcctatacagacacacaaaggactctatcacccaaacccacgcggcatattgtatacgcacacacgctcacgtattgcactagcatcttcagctccaccctgctttctgtgctgggaggctcagctgtgtcaactacatccatgggtacctttgccttctggcttccaggttggtttggacaattagaaactggaaggactcagatggttcctaaaattctccaaatcagcagaagtagggtgcctgaagtcagaagtgattctaaaaatcagaggactcttgaaggtcacagacattccatagcctgacccactcttagctagattataagaagcagagggaccctactgatatctgtactgcccatcagtctatctatatagtaaaagtggccaagacatacttgggatacttcctttttagatttatgtctattcatcagaaacaaaggaaaaaattatatcaagggtagacatacagggaacagctacattatttattgaaagtgtttatgtgtgtgtgtgtgtggtaattacctggttgtctccttttaatacttctctaagtcactagaccgtggacttcctccagctgggacaaggctgttgaccaacagtcatgtgctcatgagtaacaccattgtcagcaacagctcatgcctgtcactccagctaataactaggataatggaggacacagagcattataatgctttggaatattataagaaaaaatttctatggagagagccttgcctatcatccttatgctgataattgactctcccctggcccttacatttacatgaacacctcatgttcatggctatagttgtccagacatttactgcattgtctgacccagaagcaacgggagcactggaagcaactacacagaagaagagaaagtagcttttgttgagccttactctgtgccaagattaaagttcggacaattagcttttttaaaaaaatcttcaaatgacccattcgtggaataggccttggcagaatttccatcttacagcagagaaactgaggttcagagaggttacgcaactagcctaaggtcccccaaattaggccagccttggagtgcaccaaggcccctggaaatctctgctgctgtcagacattggtgctagtggctgatgacaacagcaggaattgatacgaatgtttagtgacagaaatgaggacagtttgtcctgtgacgtagagaaatagttttctccaaccccaattgaaaactttgtcaacagcttagtaaaatgtggctaatgtttgactcctgtcttagggttttccagagaaatggaaccagtacaggaactggttcacatgattacagaggctgggaagtcccacagcctgccgtctgtgccactggcaagctggagaagcaggaaacttcatggtgcagtttgcccaagtctgcaggcttcagaaacaagggtgggagtggggaggggctgacagtgtaagttcccatttgagtgggacccagaaccagaagtgctgacctctgagggcaggagaagttgggtgtcccggctcaagcagagagcaaactcacctttcctctgctgttttgctctctctgggccctcgatgaattgtgtgatgcccacctgcattggtgaaggccatctgctttacgctgtccaccaacccaaatgcagatctcttccagaaacacctgcacagacattaagggatgcccagaaataatgtttcatcagctatgtgggcttcccttagcccagtcaagatgacataaaataaaccatcacaacccccaaatcacagtgaaatgatgtgagacccagataaaaatatgcagctaattaaaaaaaaatttgaattgctgaatgctacagccagtggaagcctcgtgggtccctgggctgtgtatttgctccctcctcagctctgggatgaacagccagaagactactgcttcctctctcccagtctggctgggaagtctccttcccacagtcccaagccagctgacctggggactggagtggcagctgtagcttaggagaactgagatgcagaggcccatcccatcaagaaagccagggccaggcaggatgagcccagcatgctgtcctcctcactgctgagcactgatcagttggttcatatctaaaggaggaagaccagggcacttcccagactcatgggccaacacagactcatagtccacaactatccatgggttttagtgagagctggaagaagtacctcagtgaagttcaggaaacagtattttataaaggtaatgagatttgtgcagaataaagcagacattacattgtttattcgcccccacaccaagttttcacctagacccataagagatgggaaggttctaattcccagacaggatccatatcatggacccagtcaagctcacaggctctgctttcatgtgcaaagacatgttccacctccgcccagctcagaaagtgtttaaaaattgttgtctgcagacatagatggtttgctcaccttcagcatggagatttatctgggtgggccaaacaaggggttcttttactcaatgctgtctcactattctggcccatcaagccagttctcataaggagagaggctgggagcaactcactgacrcagttgtgtcctggctaaatcagaactcgatctggcttgtcttcttgctctggggctcttatgctcagaaraagggcagtgccatggataggaaacagcaccacattctgcagctggctcatccctccctgttgtctgcatatagaggttctttggatgtagacacttttctttctttcttttttttttttttgaaatggagtctcgctctttcacccaggctgaagtgcattggcacgatctcggctcactgcaacctccacctcccaggttcaagtgattctactgcctcagcctcccgagtagctgggattacaggtgcgcaccaccatgcccagttaattttttgtatttttagtaaagaccgggtttcaccatgatgaccaagctggttttgaactcctgacctcaagtgatctgcccacgttcacctcccaaagtgctaggattacaggtgtgagccaccagacccgactgcatgtagacacttttctaaaaccaatgagctgtctcagaagtccgacaagaagtccatcgactggaaggagctgtgatcctcaacctaaggggtggtctttctccattggtggtttttgagaaactgctgttgaagtatttgccagttatgaaggcgaatggaaaatttccccattaattcttaagtactctgcataagggagcaaagcttccataaagcagccttgaaccaggatgcccagaaatggcagctttatccagacagacacagcaaagacaactctttggccaaatgtctttctctgcgtcatggctttggcctaaaatatgcaagcttctcggaagacagatgaggtcaaatactcactcggctctcctcaccacccttacctttatggttaaatgttggagaggtgcacctttttggtacagctgtagcttggtgcatgctgttccttggttttgcctggtgggttagactttcagtaataaggtgttggggtgattttgctgaaaaagggatctcctgggcccaacccagcaggcattccagttgcagccagatataccgttcccttgatatttcaaggatccctcaggcttctccttgaaggaagcaggagaatgttttttgcgtttctagaactctggcccagaaattaaggatcaattttctgattgtagtagaagtgaaggttcctaaggaatagtcccgagtgtgagccttaagagatagggaatgagagaagtgggctgggtgttgttcatcctgttattctttgagtgtttcatggaatctgaacaaggacaaggaaaaaagggatttttttttaatggaggaaggatgattttctcctagggttattctaagttggggtttttaaggcagcatggactgccaaatgctgttttttgtggactgaaatcactttgggatattttttctgccacactgggaagttttagtttttaaaacaatgcttatgcagataatgcattttttcttaatgcttgttttaagagacagtcttcattgggtttgcactttccacccttgaccttgttagagatgtaatttttgctgttctccaggtgaaagtgttaaccttgcacaagtttggtaataaacgattgttgaagtttcaaaaaaatttttggatagtgctgttcctctgctcaaagccatcaatagttttttatgacgtgtggtgatttcctatcgctgctgtcacaaatgaccacaaacttagtttaacgcaacacgaatttattatcttacagttctggagtcagaagtctgacctggtctcagtgggctacaaacaagatgttctcagggcttcatttctttctggaggctctataggagaaagctgtttccttccttttccaagggttccattccatggaacagaagtgatgtcattttgtcaggcaaacatctaactttctaagttgacagaactcaacctaactatacctaactactacattatgtcatacatgtttttttaaaatacatgtttggctttgtttcttattatacttggttatatttccagcttctagaggacaccctcttccttggctctgttccatgtcttcatcttcaaagccatcaaagtcacttcttcctgactcttttttgtagtcacatttttctctgtgaccatggctgaaaaagtctctgattttaaggacttaggtgattaaactgggtgcaactgcatactctcacctgtcaaggtcgacggtacctttaatcacatagtgaagtccctttgccacatgaggtaatatattcacagacactttgggggccattttctgcctaccagaaattaaaaaactcacaaagcatgrccttactgtttctaacctaactacaccatctctacaggttttgcttccaggcacagagtctactaggctccatttgggttttggggcaggtgcatacctactgtccctctgcctgacacctgcctttgatcttctctctgtcctcccaacaccacttacttccaactcgtcctcaaatttcagctgctacatcccttcctcagagatgccttccctcactatagtcattgaacaagactgagctccttgtaagatcctaaaacttatccatcatcatattaaccataatttgtaattatttttcatgtgatattccacaaatggattagtagcacaatgtagtgattctttttgttagtttgtttgtttttgattttgaagatttgtctgctattgaatagtgtagtgattctgaggcctaggttaaggtcctttctcttctaataactagttgtatgatattaggaaagtcatttgatagcttattgccttaatttcttcatctataaaatgtatttatcatattatattaagtaccccaaaaatatatacacctactatgtacccacgaaatttaaaattataaactaaaaagaaagaaaaagaagatagattgttaagaaaatgaaaaaaagattaaaagagtttttatgtgcagagttcttagaacagtgcctgtcaaataataagcactgatacgtatgtcatagatcaaatatatatttataatttatttatatataaatatttattttgtatatttatattacattgtagatgtatatttacacaagatgctatattattatagatatagttatatataatattaggggaattttagaaatattactgtatgtctggtgcctggggtttaatagttgctcagtaagtctttgctgaaggaaggagaaagggagggaagaaagatacagagatctctgctctttagcagattttctgatatctccttagtcaatattatgcaggcaaagtagccacagcaacagcaggagtaacataacatgtcatttttcgtgctttgaagacctgttttcataaacacagtgcaatgtcattgctcttgaacccacttgcttgataagcaaaatctaattgctaggaaatacagaagtcttaaaccaccttgaattgcaggatgaaattctaataggtacaagaatgttgccacaaagctcaccaattaattgtttgaaagtaggcttgggtaaagaaaatagcatagagaaaaagaatatgttggaaaatagctattctgagatagctggagacacaaaagaagctcaccagagcagacattctgctcctgctccttgataaagctaacaaaacagcggaccttattgatgtagctgtttcctgcagcagaagcatcacaaaaatctgtccagacaaaacaaacaagtatgcagccctggcagaagagctgacgttaagtgtggaaactgaggaacatcaaagtcaaggcagctatcatcttggcaagagggatgttgttctctgcataagctgcacatctggtgggtaaggggctcggttcagagttgtatgggaaatagctctggcttttacctgccctgcattcactgtccattttggcaaaaacaccctcatttctcctggggtgccaacactctattcacaatcatcacgggagcaggggaaactgaccctacccagggctataggaattagccatgacctgggtctggcttatgaaaatgctacatctccttggccacagcaattggtccagaaatgaggatgtggcacagctggggccaatgaggctatttcccttgagatttcatggaaactaatagggaagggaaactctatctagatctctataagatccccatggccatctttgtcatcacttgggaaaacttggctgaaaaacaaaggcaacaaggaggaatgaggacaccagagatggaaaaagggctctggagccatgatacccactcgattttctgggaacgtgaaccaatcattcatgtctcttgggggaagatgtgccacacatagcctacacagtactgacagactcaggaagcctccaagcacaggtgacctccaggtggtcccctaactcagcatggaaacttgagttttggcccaggaaccaagacgtccctgtagtcccccagacatcccttgtgacctcccgtctcactgaagtcctcatgtcccaagcagcgttgagcctctccgtctgtgttcaagccattctctctgctggactgttttccttcccctcctcctgccctcagtgaactgctcctcagtcttgaagatctttgatttgcaggccttccttcccgcccccaaatgagctgatcacccctttctttttgtcatctctgaatcctcacaacacttatgaggtagctctgtaaactgcttgtcccctgtctgtctccctactgaacagtgagcttcctgagggcaggcaccaggtctggttgatctccaatccccccaccagcttactcaaggcccagcccagcagtcagagagcctgtggacagacaatgaggaacaaatgaagttctgtgaggccaaccagaccagtggtcttgaaaagctctgtttgggggtttaggctttatcttgagagcaacagggagcctttgagggggttaagtagaggagaggcagaaccttgcttgggatgagattccctggcatgttgacatggcctccttctttgcccccatgagaaagccctatacctgagttccattcacagctctagttctgatgttctgaggtttctccttaggctgtgctggtccctccagtggggctccatgccacacctgtgctttatattccatgctgggactgcctgctgtggcatcttgactctccctatttataggatgtttacctggaaaataacctaagagtacctccactctctgaccctgtgttttgctgcatcgcttcctcttgttggctggagcggccaggctgctgtggattccaagctcggagcttctgctacaaagcagatttgggacagaagtgtgtgcactggtaattttaagaccttgttgccacctgttcacacaaggccaaacccagaagaggaacaaggaagtcatgggggccaatgactcagttgtcctaagaacacaaacttctcagagtcacttacattcaatggtctgcccttcttaagttggtgaaaaatcagagatgaagcaaaaaaaaaaaaaaaatgaagttttctaatgtctggcttttagagatatttaggcacattacctggacaatggaatgaatttctcccttatcctacacattgaccctttcacagccatagcaaaaggatactggcaaaagttcaattccatggaacagaagtgatggcatttttcaggtaaacctctaattttctaaggtgacagaattcaaatgttatacctcactaccacagtaggtcacacatgctcttttaaacacatatttagatttgttttattatagttggttatattatgaggctgacaatggtaccatgtagtactttgatatgagaaaaaagtgaattaatgcaatttgagaagtctttgaggggtacaaaggactcctccacacaaaaagaaaaataactcatgaatagtaatagtggtagggtttggggaaggaggaggatgggaattatttttgagagttcatctcctcaagggaaacatcaaaaccattcaagtgggctacgcaggagcccaccatgaactgaaggcaacagggaatctcattggtctggtttcctgttgaacgtgaaaaaagtgcagggagcttatgcagatgactgcagatcagggaaatctcttctgctgtaaaaatagagagcaactatcataaaaatctgaaattaaaaagaataaaaagaagcatagttgcccaaatcttggggagtttctctattagatttcaggaagaaattaaacggaatgcaagaaaaatgcttgatctgttgtctacagctctttagaaaatgcctacgatgaaatagaaatcttcagttcaaaaaatcaattgcctatagggaccaggaaactgacctgaaagaacaaagctggacctggtggggaccatagggaagaggagagaacaggcttctctaaaagtggcggctgcttccagctcctgctcagaactgccatgcgtggataccag

SEQ ID NO: 93989 - DNA, 25926 bp, Homo sapiens
ttaaaaagtgggcaaaggatatgaacagataccacttttcaaaagaagacatacatgtggccaaaaagcatataaaaaaagcttaatatcactgatcattagagaaatgcaaatcaaaaccacaatgaaatatcatctcatgccagtaagaatggctattattaagaagtcaaaaaaaaaaaaataacagatgctggtgaggttgcagaaaaaagggaatgcttctacattgttgggagtatacattagttcaaccattgtggaaatcagtgtggagattccttaacgagctaaaaacagaactattatttgacccagcaatcccataactgggtatacacccagaggaatataaaccattctaccataaagacatatgcatgtgaatgttcattgcagcactattcacaatagcaaagtcatggaatcaacctaaatgtccaccagtgacagaatggatacagaaaatgtggtacatatataccatggaatactatgcagccataaaaaagaatgagatcatgtcttttgtgggaacatggatagagctggaggccattatactcagctaattaatgcagaaacagaaaaccaaatgctgtgtgtactcacttataagtgagagctaaatgatgagaactcatggacacaaagaaggaaataacagacactggagcctacttaagggtggagggtggaagtagagagagaagcagaaaaataacaattgagtactaggcttagtacctgactgatgaaataatctgtacaacagacccttgtgacatgagtttagctatgtaacaaacctgcacatgtacccttgaacctaaaataaaagttaaaaaaaaaaaacaagtaattactggaaaaaaaatcaccatagctgcaaaaaaaaaaaacgaccttcccttaatttataaagctgagaaaaattggaaaattaattagtaataatcactggagaaggcatcagcaacagatggattcatagtaatatgagttttatcacaatagcatgagttatttaaaactgattaattctactgtaattgaaattattccaagtgacagaaaaacaataaaaacattccaattctttttaggaagcaatccagcaatgtatcaaaagaaaatacaatttgagcaggcaggcatgccatagtgactcagtaccagaatatatatcaatatagtttattacatcaaaaaatttatagatttagcagagcacaaacaaaaaaaaaaaaagaaaaggaattaatggagaagaaccatatgaatgaaccaattaaggaaaaggcatgataaaattaatagctggtcctaatgtatgtaaatctgaggaaacatgaatagattccttaacatgatgaaggtgaaatgaccaagcacaatggaaagggttatcataaataatgaatcacaaaacaatttcctgttgaaattgtaaataggaagtgatgactattatcactcatatctcttgaattcatactatttccaattcaaatgagtttatcaacctttttatcttatatctatatcttcttttcttcacactaagattcctgcttctcatatacactggagacaacagaattgtattgttttttcacctgctttatcacacattacacagaagacatttttagaattacataccaatacatccagcagtgtgagtattgaaaacagtttaaaatgttttgcatgcgttctctccatttgctccccattttgtaaaaataaactttttattttgaaataatatttagattttcagaaaaattgcacagatggtatagagaatttctgtattactttcacccatttcccctattgttaacatattgcataaccataatacatttgccaaaaataagaaaccaacattagtatattactgttaactaaactccagactttttcaaaaatttcaatattttttccagtcatggccttgttcaattctagaatttaatctaggatgacccattgtttctatttgtcacatctgtttagacttctctggtctatgacaatttctcagtgtttgcttatttttcatgacttcatagttttgaggagtactcatcaggtattttgtgaaatgtccctcaatttgtatttgtcttatgttttctcataatcagtctggatcatgggtttgaacggaagaccccacaggagcaatgaccttttcatatcacatcagggaaaacaatgctatcaccatgactcatagctgatgatattaaccttattcatttggccaaggcagtttttcccaggagtctctactataaaattactttttcctccatctttccgtattccttagaagcaactcattaagttcagcccacactcaaggagcagggaaaattgaactttatctcctatagggtaagagctacataaattattaggaattcttccgtaaggaagacttgtctcttctctttcatttgtttatttattcaattatttatttatatcaatgtgtcgagatgtatttatatataaaatttccttttggtctaaaaattgctatataatatctgaagacaatcagatttttctttcttctattatataagttattcggtttttttttttatgtgcaagggatttttttttttttttaaagacagagtctcgctctgtcctagggtggagcgcagtggcacgatctcggctcactgcaacctccgcctcccgggttcaaatgattctcctgtctcagccttctaagtagctgggattacaggcgtgtgccaccacacttggctaatttttatatttttagtagagacagggcttcaccatgttggcccggttggtctccaactcctgacctcgtgattcattggcttcagcccccgaaagtgttgggattacaggtgtgagccactgagcctggcctgtgcaagggattttttaagtctaataatcttactattaatagaatatgtcagtattggctactatgctttaaattttttcccagttatgttgtttacctcattaatacgcagtttcaaatcttaatttttttaagatttcaggaatatcttgaaatatagtttttaataattgttccattcccttgctttggtttttctttcatgtaaaatatcattctatctatgttggatgttctttccctgtcttcatcatttgctgtttttttaaaagtcattctaattttgatcctaatttctttttgcattcacttacatgtttatatactataaagttcaccatatttggtatacaatcctgtgtgtcttgaagaatgtataccatcatgtaaatttcaccataactgaggcacagaaaagcttcatagcttgaaaacgttttctcctatttctcccttgtagtcaaaccctttttttgccctcagccccacagaaactactgatccattttttctgtaaatttacctttttccggatttcataaaaatgaatcatagagcatgtagccgttaacttccttttatttgaaacttctatctcattttcacgctgtatttcccctatgacattttctgtattccttgtagctttatataatttttattctcctttgtgcccattttggtctagtctttatttttgaaatggtgttgtttgtttgttctttcatttgttcagggggttatttattgtgttattgactaatttctgagttttcataattctggtttatgatgttctttcacatggcaggttattgtgttaatgactttggctaattttaaaacattaggatatagttttcctctgctttgtgggctttaattgtctataaagaggttattttgcttattattttgctattataataactctgaatgatatttaacctcagttatttctgaggctcattttcacaggaaattcattagcttagaagttagttccttagaaaggaaccatgattttgtatattttctattaataacttcctcttctgttgttcttatgaaatattccattttattcccacaatttaatccacttctttccccatttcctgcttaatttagattcttagtttcttctcagtgtggggttcttccctggaagaacctttggttgattagtgttgagggacagtagggcccagcctgttccaaccccttcaggtcacactgcagatagcttacacagcataagactatgcaaaccccagccagtttcaactgttttctcagatttgtaaccacaatttcaggtgaatatttgttggttaattcttattctgtcaaatacttcatcgctttcctctgcttccacctgcacatagggaagattataccacacaggccttgtagttgttggtaaattatttccaacatagatacttggaagttggtttgttgttatatttttgcctcatatttttcttcatattatgttgtccataggtttttggttttgttttatttctctgtgagttcttctaaggagatttggggattttcaaaagctgagaacctgtgtagaagattttaactcattttttcagtaaccgatagaaaaacacaaaaattaagtaaaaaaaaaaaagtttcaataacacagttaatactactgacttaatttacacaaattgaacccataccaaataatgtcataatacacattcttttaaagtaaagtacacattaaacttttttttttttaattcttggccataaagcaattatcctcaaatttaaaaagatagaaatgcagaggttaataacaacttcagacttaggttgggagttacagcattggttctcaggcctcagactcaggctgaattacattatcggctttcctggttctccagcttgaagatgacagatagtggaactactacacctctccaatcacaagagccaatttccacaatatgtttcctgttttatacatacatatatctgcatctacattcagtcgtacacccatagcaatgttttggtcagtgaaagactgcacatattgatggtggtctcaaaggattgtaatattgtatttttattatacagtttctaggtttagatgttgatatggtttggctctgtgtccccactgaaatctcatattaaaggagggtcctggtgggaagtgattgtatcatgaggcagacttaccccatgctgttcttgtgatagagttctcatgagatcttgttgtctgaaagtgtgtagcacctctcccttcacttgctctctctcctgctccaccatgtgaagttgtgccggtttccccttccaccatgattgtaagttttaaaatattctgtttgggccaggygyggtggctcacacctgtaatcccaggagttttagaggcctaggcgcatggatcacctgaggtcaggagttcgagaccagcctggccaacatggtgaaaccccatctctattagaaatacaaaaattagccaggcgtggtggtgtgcacctgtaatctcagctacttgagaggctgaggcaggagaattgcttgaacccttgaggcggaggtagcagtgagtggagatcgtgccactgcactccagcctgggcgacagagtgagattctcatctcaaaaaaacaaaacaaaacataacaacaacgaaaaaattctgtttgttcttccttactcgaaggtttgttatttgagacatacactgcgtttcttgcactgtcacatggcctttttaaaaataaggtattcagctcttagtaattgtgcattaaatgtttgtttactaactgcctagcaacgtaataaggctgttggatttgacagaacttgcagaaaataagtgctgattgtttctcagagctcgcctttgtatttctgctaagtatatttatttagggtctgcccatgaaatgaaaactgaacagtggaatttgtactcaggaagttatgtaacactttatggcagggcttaaaacaatgaaaattcagccactgcatgtttcaaacaagtatttgctgtgttgccaaagtagaaagagcagaagggaaacatcatgggaagaaagactattttgtttctgattgcaggggtccttggggcatattatgtttatactcctctctcrgataatattgaggaactctggtgactggtgtggatagctacacctgtgaaaatggtaacaaatttggtaagttcagaatttcattgtctctgtgaatatttaagtttaatcaggagaaaataattaccagctatattatttttaaaackttctgctgtcttggaaattttgctcttaaagtttgcttgacgattttcaaaccttaaaaaaaaaaacaaacttcattctttaacacaaatccctaacagaataagtatgaaggaagtattcaagtaattttaattttaaatattagaaaacaaaatatgctggctgagaaaaacaatcttactgtgattttcatggcatgaatactgacagaatgaagcatttatgaagtataaacttcagaaaaggtagaattgagcagcactgtgattagttatagaaaattctacacaacaatcttggattcaggcatgaaaatgcattctcactgaaatattctgtcaaaaggtcaactggtaaaaggtcaagggaaattgaacacacggcatgattctcagttgaaggagagtgagccrctgaggcgacagggcagctccctggctggctgcccccagtgtccacactggccctcggagacctgtggtttttttctagtgaggctaactacttggatatgaagccattcatgatttcctggaaacttctctgtagcaaactgccttcttgtagcaaaagaaaaagataattcaaggacacttagcctggatatttaacacttggctcacactctgtttccttgcatatattttttaggtgtttcaacattctctactggcatttaatgcagctctgaataagtgtgatacatgccttattctcaaggtttttgtttgtttgtttttctatttttatkttttttttagagacagagtcttgctctaytgcccaggctggagtgcagtggtccaatctcagctcattgcaacctctgtctcctgggttcaagtgattctcctgcctcagcctcccaagtagctgggattacaggcrtgcgccaccgcacccagtgcatttttctatttttagtagagacggagtttcgccatgttggccatgctggtctcgaaccccccgacctcaggtgacccgcccacctcgacctcccaaagtgctgggattacaggcatgagccaccacgcccagccctctttgtggttttttgtttgtttgtttgttttaaagacrggttcttgatctctctgttgcccaggatggagtgcagtggtgatcatagcttcttgyagcctggaactcctgggctcaagtgatcctcccactacttggcctcctgagcagttagggctataggcacatgccaccatgcttagttatttttttaaacattttttgtagagatggggtcttgttctgtttcccaggctggttttaaactcctggcctcaagcaatcccccaaacctttgcctccaacacgctgggactagaggcatcagccactacattcagccccacattttcattttctattagttacttaattttctagtcattttattagcatatagagttggtcctctgtatatacgggttttgcataccacatatattatatttttcatcctcaagtttaatttttaaaaatctgtgtgtaagtagactcactcagttcaaacttgctaaatggtccagtgtatgttgttactggacttgggtcagtttcactggaatatagcttcaagtcttatttttaaaaagttattctggaattatttataaaaatatttattttgggtcattgttttgctttattatttgtatttattatgtgtatatatatatatttatacgctaaaataatgtcatttctcttgaaagtgcttagtctctttttacatttcacttccttgtgtttgctttttcgtttctatcttatataataccttgagtttctttaccttggttttatttctgaagttatttgtcttttttgccttattccttttctgagttctaccaaggagttctgggaactgctatttcctgacttcctcttcaggaatagggtggggacaatttagtattgaaaatagacaattttgttatttcttttgtacttatttaatttgcattaataggaaagaggttcagctagttgtttgatcacccagccctttaatccacatgtttccaacttaagataggaaagcaagtttttctcatccttggaatcccaacattataggtccattaggatttggctcatattcacctccggaggtcccttttctttcatggatccttgtacagacatctttattgctttaccaaactacatgcatttctctgattacaatagaagtgtccttgtggcgattgctttggcctagcatgagattttcccctttggccaaactctactcccctttcagtactcatatcagagctcacccactccttttcacttctcatccaggcagctagttggcccactgaccactgccaaagttctttgtacatatctatgagatatgcagtgatgttgttttgtaattgctaatacatctatttttccttcttgaatctgagcttctttagaaaagagaacttgtcttacttatctttgtaattcaaactgtctagcatggaatccatcaagttgtaattcctcagtaattctttacttttttttttaacctaaggcaactatgtggcaacaccactaaacctccagtatttccagttgtgccattcagattcacctgtgagactaccagacaggaccattgggaatacctatgcatagttctgtgttcataagcaacgctggcatttgatatttgtaaactagtacttttttttcctatatctccttttaggctttgttagttgaactcttgggaatcaatcatttcatgaatactgcaacgttctttgtgagctttcaagaagtcccacctacatctgatgaaaatgtcaccatgatagagacaactttcagtaacattcctgyccgtgtatacatgccaacactaaagtcagagatactaagaacgggcttagtttatattcatggtggtggttggtgtatgggggatgctggtatgtgttccatattaaaagttttagtttatcatataacatacattttactgaaatgttgactccatcatatcaagacaaacatgttagataacaaaacacttcagctgtccaaaatttatttctttggagctatgtakatttaaaagaactattttaaatctcattctgaaagagggcataataaataccaaaagctgtagcaaatctcaggtaagaagagaatgtgtttcacgcacttagacatttattattaattgcagatttgatagaaagttgcagtagaaaacaatgaggtgagttgaacagtggattaaatatgaggaaatagaaatggtaactatagtcttctcataagcttaaatattaaggaaatgagaaagaaggcgctagatttaaaaaatagagttgaataggggtattttattttgatttcatattatatcatatatattttgtttaatgcactcatgtatttatataaatatttatattttatatataattttatttgctatagaatctaaaattattttatttgtatataaatatattttatattatatgttttctattatacatattttataattatgtatgggaggtctatgaacatgattataagctgaagttaagatggtggtaaattgaggtacattggagaaacgcagggagtggtaggtagaagaagggatgggggtttatctgacctagagaatgtggaagcaaattggattcaatgcagatgggaagaattggcaaaacacaggagaagggacatatcttcatttgtgacagaagaaaaataggtgctgatgggtattgatgtagattgggaatgtaaattggagcagtaaatggagtgattctatcattttctctaaattcagatagtaaagtcatcatttaacaatgcagtgatgtttctaacacaaaacctgagtatgacataccagtttccatgagtctcttctgcccaaagcatttctttgaaaacttttacatcaaagtatctgtgaagaatgaaaatatgtttactaaagtaaaggaattaaataagaataaacctagaaaaaaataacatttgtctgatactttctatttcaatattaaagaaaacataaaaatatgtattccaatcaaaaatatgagcatgactttttatagtaaaggttaaataagaacttaagacttagtgtgtatttgacatgtcaataatactcggcacctagttttggaaacatcacaagataataatatctactcctctttccatggcccccaagagataggttttgtaagaacctcatatcctgttacttctccttcactactgtatgatttctcctgacacttgttactaccaaattctatttatcttttaacaattttcttatctgcaaaaggaagcatttgcccaagccccatagcaaacaagtgtgacccatccccaatccatacacataccaaaacaaaacaaacaacaaaacagaagaaaacacattctttcttgtctgccaagaaaatatgaatacctaattcaagtcttagctctctctacttcctgtttactcttctctatctttctctgggagtttctgtgaagtctaatttgatttccaaagagcattttctgtactccattaaagaaactattattttgcattattgcttttggtttgtatgcctgtcctccctacccctgtctccagtagactgtgacttccttaaagttggagttaatatatatgtgtttgtactttcaagacctaagacctgttaaatgaaggagacagagattaatcttgaggagagaaaattggcttaaatgatccagtgtaaaaatgtacgaatggatgaaaaagctgacaatgcacatgtaaaaggaacactgggaagaattcatgttctataattaagataaaatattagaaatattttctctagagtatatcagtgaggaacaaggtgtactagtaggttttctcttgaaaaaaaacactcatcaattcatttggctgcctttttttttttaatttcagctttgtttaattatgactttctgtcaagatgaacagctgatagacttratgctgttgttgtatcaaccaagtaagagcactcatggtttgtttgggttttggccagatgctttrtataggaaaatgctctcagcttttttggtctttctttggttatgccaagaaattgagaaagtgagcacagagaaaatgaggttgagygttacaggaacagacacgggaaataacaaatcagatcaaacaggaatcagaaacaggaagtttagaaataattagaatacaattaaactattggatcttatggacaaattacttctgctggatttccagcctagttttcactagcagagttaataagaatgagggctttgaaatcagagaatcaggttcaaatctgggttctaaaattgattctgcgactttgtacaagttgaatgtgatctctttagcttagtttcctcatctttaaactgggaatcatataatattttctacataatagggttgttttgaggattagatgataaagcaaaggtactacaaggtatgtcagagtaaaatccttcactaaaagcaattagccaccaaattgcacatgggaacacaagcaaaatctattctcaaaaagcatgctagatcaataattactggaaaatgcacccaataaaaatgagtagaaaaatgaagaacccatatgaaaaaacacagtagtgaccatatgccatctgaacattagattaaagtagaatctaacagttctgaaaatttgcttaccatttattggttaccaccaaagtgtaatgatcacagaaaaaaaacattctggaagaaatttatctagggaaacgtaacacctgcttgtgtttgttttttccttaaacctaatccaagttttgtattaatgaatttacttgtgtaaatgacctttgtaaaagttttcatatagggcatcatcataaggatgaaacctgtttttggatttctgatgacccaaagtatcaggtttgctaaagcaaaaattacttttgattttagggttagagtgagcagaaaatcatatactttttaattaaaaatagttgacttaaaaattgttattctgcccacagctacagaatagcacctaaatatcattttccagatcaatttgaagatgtatataatgcactaagatggttgttatgccaagatattcttgaaaaatatsgtagagagcctaaaagaattggcatttctggagacactgctggtggaaatttagctgcagcagtgacccaactggtatgatgctcggatttgttttatttcttaaatatcctatgcttaaatatatttatttcagataaaatttttagaaaaaaatgttagcagattcatagataccatatacttgcagaaggaattatacttttcatatattattcacactatttatatgayatttagctaaaattgcacacctatgagttgtcaatttaaagtattccataattataactagcctactatattatggataaaattgtttttgttactgtttttttttttgacataataaaccaggcagtgatgtcttagaagcaatgtttctatagggaaaaataattacataaactttgcaaattaatgtctatagtttaataactgattctgcacttgaataactgactttgataataaatgtcacatctaaatttactgtgcaaaaaatattgtttttgctgcttttattatttattttatatactttggaaatgtataaattttggttattggtacattcacgataacctttttctgatttctagccaaaggaaaaatacaaattttgtgattcattctaatatactatagaagagatacatgcaacttccccaaaattgaaccctatattgcctacacattgttgctccgagaggccccctagtgcagtacaattaatccgtcaggagacacagattattggagctgaagcaatgtccagctgtgaccttagacaagccacctaatctcttcaaacatcaatttctttttattatattacataataagtctttcctcttacagagtttagacttctgaaatgatgaaccagttaattctgacccataattattaaaaatctagctaaaatatcttgtaaagggctaataagatatagaaaacttctaggccaaaaattttaaaagactaaaaaagagaaaacttcacaaaaaataattctagcactcaacatcctctctgccctaaaggcatatggtagtcaaaaggaaacaattaaaccaaggtgagctttgggagtttctcacggttatacattcaaatccttgcagatatgagtacacccataaatcactcctccctttaagtgatgctctgtagaaatacactctcagagtcaaagtgaacctgatgtaaaacaaaacgcacttccatttaaagccttgctgcacatcatccagatggctagaggaacctcaagctttgaatttaaattaaattaaggtagtatgagtggtaactactactgtgtgattgactgaaatacataaaaggcattgctggagaaatacagtaccatcatagtctttaaattattcttgcaaataccttgtgaaattgaatgcccmaaacactataaaatatacttgggcaaacaagtaagcaagaaacaatgaaggaaagcaagttgaatcagcagacaatagaaatgctctacaaaatttagatattagagctatcagccatacaacatgaaamaactgtcctactttgttcaatraattcaaaatgagggttacgaatttcagcagaaaatttgaggttttttwaaaaaaattctaaaacaaagtaataaccttataaaaattaaaaccttaaaaatggcataagtaattttacacagctgaagagatcatttgtaaattgatagatgggaaagatgggtcatatcaactcaggtaacaggcaaaatgaagcttgaagagccaaaaagataaataacacaaaaaagaagattaaagatatagtagatacagtctgaaaatccaatagtgctttaaatgttataccaaaaagagaggtaagagaatgggagaaagagatactgaaaaatataacagtaggctgggtgcggtrgctcacgcctgtaatcccagcrctttgggaggccaaggtgggtggatcacctgaggtcaggagttcaagacctgcctgaccaacatggtgaaaccatgtctctacgaaaaatacaaaaaaatagctgggcgtggtggtgggcgcctgtaatctcagctacttgggaggctgaggcagaagactctcttaaactcgggaggcagaggttgcagtgagccaagatcatgccactgcactccaacctgggtgacaagagcaaaactccatctcaaaaaaaccaaaaatttatatatayatatagtacctttacagaagtaccagttatactaaaagcttacttctcaacagcaacaatgtaagctctaggacagtggaacgataatattaatgtacagaacaaaaatgacggccaacctaattttatgcctcagaaagatattatttaagaataaaggagaaacagagacatatttagataaatgagaatgaagacagtttgctgtccttaataggacaaattgaaagatactttaagtaaagcattttagacaaaatgaaaacacagataaaaggttaagatgtaggaagaagcaaaaggcaagaatgtgataagatgtagagaaaccttaataagcttggatagtttaaaataacatatataacattaaaatataagaaaaaaaggagctataagagaagtgggaaggactttaagtgttataaactctttttattaccctaaaggagatagaaagttagaattggcatttgatatgttcattaccctttgagaagttaataaataacacattgtaacactgaggacaacaatttaaagtatagaaactgtataatttctaaactgttagaggaaaaaatacaataattgaaaggttaatacgaaagtaggcaaaaatagaaaaaaaaggataataaaatgaggtagtaggttgaaaccaaacactttaataattagattaaatataactgacctaaatgatctggttgtaaaaccaagtttgtcagagtagctgaataaacagtttctgatcatatgtagtttataaatggcacattaaagacataagcagaaaattagaaagtaaatgggtggaaaatacataccataaaaacacatttaaagatattgctaggttaaaaaagaaggttacatcattacagaaaaagtttaaattaccaagaaaatacaayaccctaaatctgcgtggatttaataatatggccttaaaataaatgaagaaaatattaacagaagtgcagggaaaaatacacaagtccacaatgatagcgagaaatttaaggatacctccttcaaaaattaaaataagaagcagacaacaataatagtaagctgaaagactgctggaataacaacacatttcgtgtaatggatgtataaagaacagaggaacaagcaagcacacaaggatttttttttttaaatggatgatgtactgggctatgatgcttttattatcttttaaacaccttttaaatgttctccacatttagagcaatatttataggaatttgtatatccttaaaagcatatattagaaaataagaaaggctaaaattatgtatctgactcaataattctttttaaaaaagaacagacgtccctaaaaatacaaaggagataataatagtgataatatcagaaattatgatattcctaacaagcttcagtagtatgaatgaaaagtaaaaacttaatactttgaaaagatgaataaaattgtaaaatctctagaaagacaagcagagagaaacagattaatgacagaattgaaaaaggggtaagattgtatgtagatccttcagaaataaaaaagaattagcctttaataagttaataatgcacactgtaagtcttaaaagagatattttgaaaaacttttcaattaaaacaaaatggaaaaatatgtaaataatcaaattccaagaaaaatataactcaccagatagacacgagaaataaaaatctgagtcatttaataactactaaaataattaaatcagtacaggttgaatatccctaatttgaaaattcaaaattcaaaatgctccagaatgtaaaatgttatgagcaccaatatgacactcaaagaaaatgctaactagagcattttggatattaattttttggattggggatgctgaactagtaggtatgatacaaatattccaaaataaaattaaaaaaaaaaaacagaaatctgaaacatttttgtcccacgcattttgaataagagatactcaaaatacagtaccagtagaaaacctcattggtaatacacgttaaacattcaaagatgaaataattccaaataaacatgaagtatgccagaggataggaaaactgtgtatattctctgatttattttcagagaagcatattttttataaccaatcaagcaagagcagattgttgtcaggaaacaagagcaaattaatttcaggaataaaacaatgaaccaataacacgcataaaactaagatattagcaacatgaacaaaatataccattatcaagttgctaataatggaaggaaactgtattttataaaaatcagttaatttccctcatattagtaaattacagargcaaaatgatatagcatctcactagatgcagaaaaagaatttgggaaaagtcacaataattgttatcattattggttaactaggaatagatagaatttccttaaccagataayctacgtggattaaaaatgcgcacaggtggtataattctaaagaaacttgcaatgttaaataccataaaataaagagtgatgatttctgggagggaagaaaggtaaatgatcaattcagggcatatggtgaactccctgaaccttacaaatatttgttctattttgcatttctgttttatgaagctatgtgctttcttttcttttcttttttttttttttgacggagtctcgctctgtcgccaagctggagtgctgtggtgccatctcggctcactgcaacctccgcctcccgggttcaagcaattctcctgcctcagcctcacaagtagctgggactacaggcgtgcgccactatgcccagctaacttttgtatttttagtggagacggggtttcaccatgttggccaggatggtctcgatctcttgacctcgtgatccgcctgccttggcctgccaaagtactgggattacaggcgtgagccaccgtgcccagcctatgtgcttgattttctatgtttattttatttaataataaaggattaataaaataactgcacattcaaagatttagttacctgtaaaattgaatttattggtaaaacataaaatatttttgtgtttttccttatctaaaatcagccacctattagctacctacttaattatttaccacacctctactaatgtaaacagcatctttcatactagatattgagctaaatggaatgtgtgtggcaatcttacttcagctataacactaaactgattatttaaattcagaaattatttttacataaaaaatattctaatggacttataaatattttattttgctaagtggttcccgttattaactttgttttaaatgtaataaaataaaatttgctgctatttggttttactgctgtatgtgcatattttattttattttttatttttagaaagtgttatatttatgttaaaggaagaatgtcagcatgctgtactttcttcaacactatatagaaaatgctgttgcgagttttcagaaatagacttccaatttacccattaaacttcggtctgagaagcacccaaatgcatgtagcttcaataatcactatttatgacctataccagtggatcccaaattttaacttgcatcagaatcacctgaagtccttcttaaaactcaaattgctggtctctactcccctaatttagtaccccattaacargaaacatttagcacaccctgaaaatatgcatgttgatttatagataatatttctcttaacaccactataatttgaatatttaaaacatgaaaattaaaatgaattagatttttatagcaggaatgagaatcctaatatgttcttgctcaactttaataaatatttttgtatttatggctcccaatctcccacaaaacacctgagagagttattttctaattaggataccactgccctatagaaattaaaaaagataattatacagatgattgcagcatgaagagaaagaacacacttggaatactcccatttagaaaacaaatcaatctgacccacctgtttcacagagggactataggacttactcagaactaattcgttcagtgttaaagccaaattagaattcttagttatttgatccttttctttttctttttttttttttttgttttttgttttttgttttttgtttttgagacggagtcttgctttgtcacccaggctggagtgcagttgsccaggctggagtgcagtggcacaatctcggctcactgcaacctctgcctcccaggtccaagcgattctcctgcctcagcctccccagtagctgggattacaggcgtgtgccaccatgctggctaatttttctatttttagtagagacggggttttaccatgttggccaaggctggtatcgagctcctgacctcaggtgatccacccaccttggcctcccaaagtgctgggattacaggcatgagccaccgtgtccagactgagattttgctttttaatcacagattagatggtctctttccccaccaatgaaaaaaatagcacaaatcatyttgcttatattaatagtattaaattatagattcctataatattgaaaatgggaaagttcctgagatayatttttgttgtttctgattwtcttgttgagaatcttaattaatsgcacatcaatatattgtttttaaataaaaatgttttcaaatgaaaattattcaagaaacttattkttaattgtttttcagctcatagaagacccagatgtcaagatcaaactcaagcttcagtctttaatatatcctgcccttcagacgcttgacatggatttactatcacatcagaaaaaactagactctctagttctgtccaaaccattcatggtcaggttctgtagggaatactttaccacagacagatcacttgaaaaagtcatgttcttcaacatgtaccaatggaatcaaaccatctgttcagatttgttaattggagttccttgctcactgagaagtttaagaaaggycacttttgttatattccaactcgtggtagttctgagctagctaaaaaatatccagggttcctagatgtgagggmagcccctttgttggccaatgacaagttacatggtttacccctgtcctatatcatcacctgtcaatatgacatcttaagagatgatggactcatgtacatcacgcgactktagaactctggagttcaagtgacacataaccacagtgaagatggattccatggagcactttcctataatgggcttaaaattgagtatggaatagaaaatcagtatatgagttggctaagtgaaaatctatagtaaaaatgtaagcaatggtttatttaaaatgtataaggctcagaacaggaaacaaattagtgaaaatcaaagggttgatgtttgaattggtctttatcatctgtgacctttctaaggtcctcatagccatagtgggttttggttttgtttttatttattggccgctagcaaattcttctccattttatttattatcctgttattcactcacttctgtgaagatactttagtattttcttctgctaccattactcacttgttaaatctctagtttacagctatagttttttgattgccgaatagtattacagatgagaagaaagttttaaacaaacacgtctgatttgtaaaatgccagttttagtcaacatgaatttagagacttaaaatgtttccctgtgagaactgatatgaaatatgtgccatctcttttaaaaagcatttgcctcaatataatgctgtttgcctgtcactgtaaaatttgcttcttaatacagatctcttccagtactaggataccaacattaatgcaaatgatctttcagttactttagggaaaggcagctctaattgtgtgagaaattagggaggttgaggtaggcacgaagccagcataaggcagtagctccacatgtggcagtggcttatagtcgtgagcgaagcttaagacacggaagaaattatacaaccaaattgaaacacttaaatctctgaaacttcttatgtccatataggcaccgtatgggggaaagaccacaaagaataagccatagtgatcatatggtatgtaaggtttgatcgttttggagctgcattgaggaaggcagctgagggccagcatagaatttcctcacagccactggaaaccaagctttctttattttcctgctcagctgttgacaggcaggaagcactggtggggacagtggggcaaatcacacacttccatttttgtctattatatcaggaaaaacaatagcattcctggaagccccactcaatacatatacatatacatatacatatacatatacatatacatatacatatacatatacatatacatttttatatgtcattctacagaattatatctcatgtgatcagccttagctgttaaggttgcctgaggagtcattttttttaatctgagcacatcattctgagtaaaactaatattcagtaaaatcatgtaagtagtagataggcagtaagaagtaggccacaaattctttagggtaagtgattaaaattatgtgtgaataatatatagaaatatctggggtcatataatgcatggaatggatgtataaatgaattacacctacagctcccaatggagcatcacagtaatatttgtgtactcaattagttgaagaaggcatttgtctgtttttttttttttaatttggatctctatgccctattcctttacctccctcaaaccaggtgcccataaatcaaaataatctatgttccctggtgggaacatagtcttaatttgggttaggaagatacatttaaatatagacataagttatgatacaaaaaaccttattaaagcaacataaacaataatgatgaaatgaattggtattagttataccatgttttcccaagactcctgccaaaacgaagacgcagtagagtgagggaatgatagcaacagcaacataacattctttaattatttacctgcagattcattttctggtacaaatatccatcttggtgcctatctttggtttcctcaaagtaaaataggataaataattgagtgtcccctaccttaccaactggctttttgtattctaagtcaccaggcctggctcttactaattgcttttatccctctctacatctatcatcactcccaagtcaccctcatctcccaaaccctaatacctgtaaagtcattccctgtaccttattctgtcttttccatagtccctccccaattcctataaatttcactgagctgtctgggactcatgattcatttatgagtgacaccctcaagcttttgtcagtgttttccatcagttttcaactgagattcagtacttaatttaggatcatgcttcttctatttttttcttccacattattcatattacaggattttaatgtgcagtagatgtcttccttgctcattgctgctcccagactgttacctctcctacagccttctgaattattgtagcaggctagatcaccaatctcccttccattttgtagtcatctgcttacctctgagtcactggtactcctgtctcaagcattttagatttaagctcattgtcactctaatacccaaatccattattgttgtcattccaatatccacaatgtaatatctccaatattacaattgaggatttcaaaatctgtacagataatacagccagcaacatggactctgatttttatgacttgttcttttccaatcatctgtcctctattcctttattctgcacaaatcatttgtccttataatcatgccttagaccttgttactaacaaaaactatacctctctaaaatctcagcattaaatagactactgtcggattataacctgctgtatttgtaggccactgccactaatacttcaatagccacaatgcttgagaattttaccaggatttcatatttcctctctatgctcatatacattttttttattttcttcattactcagattaagttgtatagtcagtcattatcacttctttgcatatatacccccaggttttctctctctctcccccatctctttctccttcccctatcaccctttatccttcacagatgagcatgatagaataaaataatcctgcttcaatgttctcattgtaaattcaatacggcaagcttcccgtgtgcccttagtgctgtccatcaatcatattattttccccaagtcaatctctcctattattataactaaactgtgctcttatatgaggccaaattctcttaagtgtatactagattcatccccttttgctttctcaaggacaatattctagaaattatctttttttcttctgctttattgctaactgctggatcatttccaccagaatacaaatatgataaaatttcactctctttaaaaaaatctctcatgactctatttccccttccagttccaccatatttctctattttcctttatagcaaaacaaaaagaaaaactgagtagagctgtctatatttgctgcctccatacactttcttccaaatctttcttacatatcttctccaatcaaccttttatccaaaattgctctaaccaccaaaatccttcttgtcagtgttaatgatgtagcaggctagatcaccaacctcccttctgttttgcagtcttctgcttacctctgagtcactggctctcatgttactatatctattgttttctgatctattttgagtagggtgcttctgatcttggaactcaggcctcttctctatctgcagtttattctctgagatgccattcagtctcatggccttaaatgacagagaaggcaacccccccaggtcatatcttcagtctggagcttctcaaatccagcttaatatatatccaatggcttacttggcaagctcacttggatttaaataaaaatcccaaacaaatttctgatctccctcaaataacctctgatctttgtctttcttatttcagcaagtagcaattgcatatttcagttgttcagaacaaaagcaaaacaaaggagcaaacaaaattagctattttttattttctttttattcattctgtcacacatatcgttatcaaatcctcttggccaaaatatgtccgatattcaaccccctttttcttctaaactccattgctaataccctcctctaatctactaccaatttttgcttagaatagtccaatagcattctaaccaatatctccccttccaccctgtacccttagagtcaatttgcaacatgtcagaaaatgatcttttttaaatggaagtcaaatgatgtcacactcctctgttcaagatcctccagtggcttctcagctatgtcagactgaaagctctctaactagtcttacttgcctcctaagtgttatttgaacatccctggaatgctccagccttatcattgagactttccaattgacatctccctatcttccatgctccttcctcagatacccacgtggctcactcccttatctcctcaaatatgaccttctgaactccagagcagccaataaaaataataaaacagacatattggtaacaaacctcaggtgaaggtaaaagagaattataagaaatactcaattcgaaataaggcttaaaaagaggaaaatggtagaaagaaaacacgggatacatagaaaccaaatagtaacgtttaagacaaaccatatcaatgattacatgaaatgcaagtggtcagagcatcaaattagaaatcaaagattaacaaattggattaaaatggaaggtccaactgttttaagaaaagcaaaaaaaaaaaacctcgtaaatgtaaaaatgtagatatacaggccgggtgcagtggctcgcgcctgtaatctcagcaccttgggaggccgaggcgggcagatcacgaggtcagcagattgagaccatcctggctaacacggtgaaaccccgtctctactaaaaatacaaaaattagccgggcgtggtggcgggtgcctgtagtcccagctattcaggaggctgaggcaggagagtggcgtgaacctgggaggcggagcttgcagtgagcggagatcatgccactgcactccagcctgggcaagagagcgagactgtctcaaaaaaaaaaaaaaaaaagtagatatataagtaaaatgattggataagacatactatgcatattctattcataagaaatctggattggctatattaatatcaaagtaactttcagaacaaaacaaaattatggataaagagaggcatttcaaagatacagcagagaaagacaaaacgatctgaaatgcgtgtacacccagtagcagagattcaaagtataggaagcaaaaaaagactaaaccgaagacagaattgataaacccatagttatagttgaagatttcaaaactcttctctcattttatagaacaaataggggacaaatttataggaacataaaagtcctgaataatatcatcatataacttaacctaaatatagaatagatattgcctatctcttaataagttgttctaggtattattatttttgatagatttgtattctgggcttcatactagagttgtgagtggactgcccaccacaactacagtattatcacgttctgagtttgttcacgtacttaattttaccagtgggttttataccttcaaatattttctttttacatgttagtgtttatatttcatataaaaacagttagaagaaaagctagaaattatttaccaagttctctttttcctttttcactttcccaccttgtctctaaaggtctccactccctcccctttaccatctttttccctggttcccatcttctcccctagttaccactcacaatgagctgtgcacacctgttattaattatcttcactaagttttatgagctagcactcagacttttgtacaagcttttcatgctttgggttcactttctctttctggggggatgattttagctcagtcttagacctttcatttccctttcttttctgtgtaactttcccagacaattctctcccaggtctcattctctgtacagtttcaaggcaagaacttgagaaacaactctgttgaaagttgctgtttacttttctacttagagataatttgaagtttgaggctttgtagctttatttgttcttgttgaactattttgctggagggcgtttcttgagatttgaatttatgtggtcatgattattcttgagcacttgggag

SEQ ID NO: 93990 - DNA, 12901 bp, Homo sapiens
  misc_feature (1)...(12901): n = A,T,C or G
taccaatttaagaaggagaaaattgatgtactgataaacaaatgggcatcttaggatcatgtttctcacaagtaaagcagttccagaaattcctaggaccctaatgggttttattgtaaataggttaaacatatcacgtaaaaaattgttttctacagttctctaatattgcttacaattgtccacgtttccatgtttataaacttgcctttttttttttttaatggagttttgctgttgttgcccaggctggagtgcaatggcgtgatcttggctcactgcaacctccacctaccaggttcaagcaattcttctgcctcagctttctgagtagctgggattataggtgygtgccaccacacctggctaattttttgtatttttagtagagacggggtttcaccatgttgggcaggctggtctcgaactcctgacctcaggtgatccacccgccttggcctcccaaagtgctgggattacaggcgtgagccactgcacccagccttatacttgcccactttttaattctaagaacttgctactcaatggaggatcctgggaccaataccatcagcatgacttgaggacttgtttgaaagcagactcagaatctgcaatttatcaggatccccaggtaatttgtatgtgcagtctagtttggtagatctgctctggcagactggaagactcttctatctgcctcatgtaaggtgcaggtgacataattaggtaatcaagcaaaagatcacattttttaataagaaagagacactggctattattttgagtggyaaaacaggttattcagtcccagtttaaaatggaaatgacagagaccaagatcaagatttctaatttgagatgtgcctgtgatgcaattacatttgctgaatgaaactgcttcagtaattagatgcaggtttcttctctcttctttttgagatgtagagaggacacaataggctcatggaacttaaagaactcgacaccagctaacaaaacatgctatccagcctctttcatttcaccatattgctttcttgaaaacatagtacagtgccagtttagcattgaaaaaaatcagttctcctaattctaaaaagaggagacagccaggcgtggtgggtcactaaaaatacaaaaaattagctgggcatggtggtgcatgcctgtaatcccagctacttgggaggctgaggcaaaagaatcacttaaacccgggaggcgaaggttgcagtgtgctcagatagcaccattgcactcccgcctgggcaacaagagtgaaactccatctcaagaaaaaaaaaagaaacagagagagagagacaaactgtaatttcatttcagaagttttatagggtactatttccagttctttttttcttactccattgaagtgtaattagcagtatgtgaaaatttccactttatcctcaatcagtagcctctccttccaattagcatwtwttttctattaattttgtaaagtgggattcttgttttacacatacccctggaaagtatacttaaactgtgagaccctgggattttatatttccaaatagaagataccatcctcttgtatcacaaaatgtacttaagatggtttggattatatttaaatattcttgaatgaaatagacttagtgattgaagccaattattatatttttccacaccaaaataaatgcaataggaaaagatgacagtactatctagtattcctgcttcaatattgcacaaattagaaacatacatattctgttatgttatagggtctagggctttcggaggacaaggctgcagtcagctgagatcgtgccactgcactccagcctgggcgacagagtgagaccctttctcaataatagtaataaaagtaaaaagaaatataatatttaatcaatatatgcacacacatgggtttatcatgacacacatgacatttgtgtacagtgaaaaaaaatgagtaaatctagaaacctgtattgcctcaatagctagctgagtacttcaatatgcatgtttatttcaacaattttgtgttaagcttcagtggtaagtaagcagagtacactgaccataatgaatacttcttttgatgagggttatcactacacaattaaaatatgatatagttggctgggcacgttggctcacacctataatcccagcactttgggaggccgaggcaggtggatctcctgaggatgggtgttccagaccagcctgaccaacatggagaaaccccgtctctattaaaaatacaaaattaaccaggcgtggtggcacatgcctgtaatcccagctactcaggacactgaggcaagagaatcacttgagcccgggaggcagaggttgtggtgagctgaaatagtgccattgcactccaacctgggcaacaagagcaaaactccatctcaaaaaaaataataataaatatatatatattatatataataaatatatcatatatatgatatagtttagagttaaatactgactgctcttgggaactttgaggtattctgagggatataaataacatgaagagaatagcacattggcttgcagcagattagagtctgttacctgcgtgaatacttgtttttcatgaactatgaggatccccttagcttttgaaccacttctacttgtgtttaaatttaccctttaattttggggtttgacagactctgcccttctgttccgcttgagtctggcttttcctactctgactcactttgattcttgacctctgaatcttattcctattttacaataaacacatgtggcacatatgccaatgagtagagtggaagagagaaaaattgccaaggaactgtgtttaattttgttcctttcgcaaaccagataccataacagaaaaattttaggaatatgtgcatgttcagtagccttcaatgcaattacagtcattattacaaagtgttggataatcaatattttttaaagattcactagtcccttctcataattttagaactttgggaagtaacaatacaaatgtatttttagctgtgtcctttaatcttttactgtttcctctatgtgtggtgtttggtttgtgtgtgtgtgataattattataaagatcagaggctaacagaggtgtttatcacaaacttttaaaatttttatttttattttttaattctttttaagagacagagtctcactgcgtcactcaggctggatgcagtggtgccaacttagctcactgcaacctccgccttcaaggttcaagcgattctgctgcctcagcctcccaagtagctgggactaccggagggcgccaccatgccccactaatttttgtatttttagtagagacggggtttcatcatgttggccaagctggtcttgaactcctgacctcatgatccgcccgcctcagcttccctaagttctgggattacaagcgtgagccaccgcgctcagctgcatgaccttttaacttgcctcatacactcaatatactcaaggtataccttccaaagtgaaaaattatggcacgttgcagtcctgwccactaattgagaactttgatgcattggattttggagacctcattttatcacctggtccttttactttatgacttgtcatgctgccatcttttgatgggattgagatcaagataataattcccaactggtcaggaatattgtgcccctttgtttttatatccagatgcaatagagcctctgacacaccactactatggttcttaggatttggaacaaaatgcttctttctttgacaaaataaatgttttctttaaagaattcttgattgatcctggaccattgtagaaactgaagtcttaccaatgcaaaaaaatatgacaacatgagctgcttatcatgaaataagtgttttccagttaactatcctgcttcatccgcaggtaggaataatagaatctatacctatgtcttcatgggaatttctctatggccagttgattagtgagggaaaaattgagcctgatttacagaagtcgctgtacaacatcacagcaacagccaaaagtagattgcttaggcattataacctacttgaatgcaattttaaaagaaattcagcctatgtaatcagttgtccacgatgtctagaaggagagatattactgatttatatgtggcagctaaaaatttgtctaggtaattagggacttggggccaggactggtggctcacacttgtaatcccagaactttgggaggacaagacaggcggattgtctgaggtcaggagttcgaaaccagcctggctaacatggtgaaactccatctttactaaaaatacaaaaattagccaggtgtggtggtgtgtgcctgtagtcccagctactcgagaggctgaggcgggagaatctcttgaatccaggaggcagaagttgcagtgagccaagattgcaccactgcactccagcctgggcaacaaagcgaaactccgtctcaaaaaaaaaaaaaaaagataattagggacttggaaggacaaagattgaaggattggtgacaatgagttttggggaaaaatacgtagatgaactacagaaaatgagccagagtgtaagaatatttgtgcttaatatgaatactcaccaaactatcatcaggaaggttatcaaataaatatgaaggtatgaaacaacttctttcaccaggcactacattgcttgctcagaaggctaataaacagcaacattggtggtagcagtagagaatacatataggtttagcaacatgttggactttaccactgtcccttaccaaagcctatttagctgtcaagactattaggtgtccaacacacaagcaacaaggaccaaggctaagcacaaaataacatatcctgggtgaaaaaaacagtcaccttttgtcagacttgttgattttaccggagctcctctatgataaaggcaacaaggaatgttgtaaatggaatctagctttatatccttgaattacatttgcttgacctgacatcatgtttctctgatcaccacttctccgtgggtacattgaatgctttatacatactgccataatatcctgttctacatccttctattcaaagaacttgttgtataacaaatgagtagatattcactgcactcacctggtccaccatttatcctatcactaaccaaaattattattattatagaatggcgaatattttattaaagactcaatcacagtgccagctggagacaatggcttataaggttgtactcatgccagaggatgtggtggtgtatcctctgaactagtaactaagtataagcttgtctggtgtctcccatataaaaaatacaacaatctttgatctttgttatgaatgttgaagtgactccttttgtcattacatctaatgatccactccaaatatttgtctcttgtctctgagattctaggtttttgcagaattagtacccaaggggagagtctcaacagtatttcattttacgatccatcctttgttagaggatgaaagacttctaactggccttttaggttgcctgagacctttagacaaacagtcaaaaatttaaaatttaaaatgtggcacaytgtkgcatggggtagtaaatcttgaccttaaaactggtatttgtaagaaaaacagaaagaattcagggatcccctttgatggctcttaattctatacagtcctataaatattcatgaagactagccaggcgtggtggtgcacacctgtaattccagctactccagaggctgaggaagagaatgacttgaacctgggaggcggaggttgcagtgagctgagatcatgccacttcactccagcctgggtgacagagcaagactctgtctcaaaaaaaaaaaaaaaaaaaaagaaaaaaattaatgaagactaattgccaaaacttggaagcaaccaagatgtccttcaataggtgattacataagcaaactgtggtatattcatacagtggaatattattcagtgctaaaaggaaaaaactatcaagccacaaaaagatacagaaaaaacaaatacattttgctaagtgaaagaagccagtctgaaaagggtacatactgtgatttcaactatatgacattctgcaaaaggmcaaactataaagacagtraaaagatcagtggttatctttgcagaygccgccgtcrctgggagccctgtactatcagccatggtcaaacccatcgtgttttttgamatcgccgtcgacgccaagccctcgggccgcatctccatcaaactgtttgcagacaagattccaaagacagcagaaaagtttcatgctctgagcactggagagaaaggattttgttataagggttcctgctttcacagaattattccaaggtttatgtgtcagggtggtgacttcacacaccataatggcactggtggagaaatttcatgatgagaacctcatccgaaagcatacaggttctggcatcttgtccatggcaaatgctggacccaacacaaatggttcccagtttttcatctgcactgccaagactgagtgtttggatggcaagcatgtggcctttggcaaggtgaaagaacgcatgaatattgtggaagccatggagcactttgggtacaggaatggcaagaccagcaagaagatcactattgctgactgtggacaattctaatgagtttgacttgtrttttattttaaccaccagacccattcmttctgtagctcaggagagcacccctccaccacatttgcttgcaatatcctagaatctttgtgctcttgctgcagttccctttgggttccatgtttcccttgttcccttccgtactagctggattgcagagttgagttaagtttatgattatgaaataaaaaccaagtaacaacaacaacaaaaaaaagatcagtggttgccaggggtttggggatgggtagggagataaatagttctgaaacaggcgatttttaggggattgaacatagtttggtaataatgtaatgatgggtacatgacattatgcattttgcaaaactcataggcctgtaccacacaaagagtgaaccctaatgtaaactgggggtgggatgaaggtgagagtatgtgagaactctgtactttctgctcgatctttccgtaaagctaaaacagctcaaaaaataaagtctattatttttttaaatgaaagaaattaacaatgaccatagcacgctcacacaaatagattatcgaggacatttctctgtcaggaatgaatattgggtcatctcacaaggtaaaaccctgactagcagaggtgttagctgagggcacatggctgtagatgccaacagtgacctgatggccacttgcagaagggagagccttgacatccaaacacattgtttctcttgtattgtcctgtgcatacttatgtatcttaacaagtttccttctttcctcttcatttatccctctttttaaaacagggcttattgagggtgattaacttaatttttaaatgatatgtggcagaatgtcaagagagtatagtggagaacttcgtaaggaatggacataacccagaattcttagactcagagtacatgctgtgattgagaattttttattgtttcattgttcaagagattgtaggtacatgttcaattattagagaaatagttgcactctgttagaaggtagcttgggtcttttgtgtttactttcaaaagggaaagtttatattgatattgaacaagttaaagcatgcatatttattatttgatgtttgtttctgtgtttgaggaattcctcagcctatcagttttgacgaaaacaagaaaccacctcctgctttagaagctaaaatgccaaatgcttgctttctcagcctcctttgcagctaggctacaagcatatgatttaggttttgccaatctgtttgccagtgctgaatttcsactttggaattaataaaaaaagaagcagattcagttatgctttctcttgtttctggtggaggccatgtagcagctgctacaatatctgttgcataggraacaagtgggagtggtgctggtggctttgcagttagcctaggattgagcaattgctgcaactgttgctctctgcagcttcagcgttacttcttactggtggtgacagtggtttcctccctggatgagttctacagcatggtttggggtacatttcctggctgcctagctttgatctggctytctagccttctcaacagttctacaagttccccactatttctgtggtaaasctatttattgttaatgtcagccataattggcttctgtgttttatattttttaaaattccaagatatacaaatgtaacagatagctcaacaaacatatgtctttttaaattaagatatattctgtgtcacatgaagtacaatggacaaaattcaacaaattgaattgcgctaaagaccaaagatatattaagcctggctagtcttaaaaatgtaactggatacagccaggcatggtggctcatgcctataatcccagcactttgggatcctgaggcgggcagatcacctgaagtcaggagtttgagaccagcctggccagcatggtgaaaccccatctctactaaaaatacaaaaattagctgggcgtggtggtatgcccctgtaatcccagctactcaggaggctgaggcaggagaataacttgaacctgggaggcagaggttgcagtgagccgagatcatgccaatgcactccagccttggcaacagagggagaatttgtttcaaaataaaaaaataaaaatgtaactggatagacctcaggttcttgaataagcagaaaataatttaggtaaaaaccaaataataaaccaacattctaagaggtttagtatttggaggcccaaatgtcttagctaaaagtgttcattctaaactcacaggaaaagtgaaatatgaaaatatatagaaaaatcttaggcagtatwtrtcaattttaagcaacaactatttacaggtttttcaataggcattacattaaaaatgaaatatatagttaataaatatgaaaactgtggatataatcaacacatttattttacttcttgaagtgttaacatgtgctgtctcaaatatcaacagtgtacacgtgggaaaaaacattttacatagattttctgctacagaaaacagcctctcattagatatcccaagttttttcatttggaacacacgcccattccccagtatactaggggtaataataatttataaagtttaattactttttactactagaaaactaattttatgtttggcacaaatttctgaaatgacattccactgcaaagaataatacctatatatggccagaattactttttttctgtaacattaagataatactggtcagcctgagcaacaaagtgagacctcatctctacaaaaaataaataaattagatgggtgtggtggtgatgagggtctgtagtcccagatactcaagaggctgaggtgggaggatcccttgagcctaggaggtcgcagttgcagtgaactatgatcacaccactgccctccagcctgggtaacagagcaagatcctgtctccaaaaaaaaaaaaaaaaaaaaaaaagataattttggtataattcagggtttttgcctcaatccccatgcttcttcatttgaccctccctgactccctgatgaattttagtttgaagttttgctctagtccagaagttaatttaaaacatcttaataaaatttccacctgcctagatatttcttgtttgttacactttagtccatgatttctactgccatttacattaccccaaaaatatgacctgctgaatttctgctgtcatgaattgactaacatattttgggcctaaaacctttacatttagaatctttttgtttggtatttgaaaataatgtatgtcctccatttattggtcaaaagcagtgcytatttatttctacgtttaatcagagagactttgtaatagttatttaatattatttatgttcattcatttgttgtatataatgaggttaattgctatgatatttttatgtcgttaatataataaaaaatatgtcatcttttctcttccaatgagtctttgggttattaatttttaactcaggtatcaagcttgtaaaatgtttaatggcttataataatgtctaacacatagtatccactgagttctggtaactccagtttatcaaattctctttttttataccattctccaaatgcaatgctatttggttttatttttattttttaaaaatgtgctgcctgatttgagtctctaaaagtgtgaaatgttcagtattttccaaatgtatttgaacatggagtgttatatttactaaaaagttaacaagcaagtattcccctaaacactctagcaaatactactagtacagacaaattacgatctaacattatagtacattttaatttattaggttaattttggttgcaaacaataaaaagcaaaattcaaactggcttgtataatagattttgaacaatagtataggctcaagatagtttaatgcagaagttcaataatgacacaaaataaatgtttcttgtcttccctgtttcttcactctaccttaagtggtatagattgaatgtatccccccaaaatttgtatatttaaatctaatccctagtgtgatgatgatatttggcagtgggtcttcggggggtgattaggtcatgaggacagagccctcatgaatgggattattgctcttataaaagagaccttagagaacttccttgtcccttccaccatgtgaggacacagcaaaaagacagcggtctatgaaacaggaaacaagtcctcactagaccctgaatctgttgacaactagatcttggacttcctggcctctagaactgtaagaaataaatttatgttgttcataaaccatccaggctgtgatattctggtatagcaatctgaaaggactaagacattaggtctcagttttattctatggcttaaaatatcatgtcatgagtagacaacttccaatcctagtaccttgtgcttcctctgctgcatttggaaagaaggcatttcccccttcaatcgtggaatgaaaaaggtgtacttcattctgatttgattagcagaaggcatatgctctttcatgcaccaattacaatgaccaagaattgggcatgggactcatgtcacttaaacattgtgaagctgagaaattcattatttggttaggagtgtgtgagatcagggaacactgaatgcttgaggtaccaccacgatgtccactgcaggtatttccatttcagtaaacatttccattaagataatgctagaacaaaatcagaggagtagatcttggtgtcccaacttttgttgacctaacaaagtgaagttgcttcaactggacacttctgaaccacatttatgcccatatgttcagtccaaatttattataagcaattttcaggtccatatgtttaggatatttcatttgtttggttatggcatatatggtaacatgtggtttacatacaaarrmtgcgacatatattttgcaggcctttacacaaaagtgttttccctaaagggagaagagaaaagttgaatgcagaagtaaaaaaaaaaaaattcatttgcatttgtagtatttgtatctaaatattttatattacagacgtattaagatttttatcattttaaacactactttaaaacagggagatggtttaccttcaaaaaatttagctctcaactcaaagttatcaaagtatatcctagatgtagtttgcttgtcaggcttctacatgaaaatttaaaaggctcctgcatttcagaatgagcctaacatatgtaattgcactcatccactatgtctacattgccaaccaaatactgacagagagagctatagagtgccatagagagctggcagcttttctgtttgcattagcttctactttcttcttcatctttcctctatgtctgacacatttcatgttactgtttttaaatgttcccttaactacagagctaatgtgcttatatctgtcaggggtctcatgtgaacctctaaatatttaaagattcwttagctccctggagggccaccatgatttccaaaacaagtcacaatacctaaagatctaattgtacaatttccctcagaaatagccttgaggaagaagtcacatcactcagcaatgagtattacaattattcacagcagttttcatggtactatataacatccaatttacagaattaaaggtaawgtaatttraaagaaaaatacctggttttaaggaatgaakggccatgtcaactattggaagcatctttgaattrgagcctctatgttcaggtttcaccaggtttatgtttttaattantatcckattcagcttsctgtaatttccactgaggttttctagaacaagrcaagtcagaaattgatctttaattataagctaagagcaaactgccaaagaactgagacaaattttgaagaaagaggtctatcaggactaactattttaagagaataaagactaatcagacacacacacatatgcacaaaaagagggagagagagcacaaaaatcctacgaaatacattttaaaaaattaatttttttaagaagaagcatttgatctgccaaagggaaaacttagcagtttggagatctgacagtgctaatctcagggcaagaaaataacaaaataagacaccaaagaattacctaaactgtgaaagatgaagttttcagagttctaacagagaattgggatactaaagtacaaagtttaagaggtgtaatatattaatgtttaatttatatcccaaatacttaaaaactatg

SEQ ID NO: 93991 - DNA, 14335 bp, Homo sapiens
agcctgggtaacaagagggaaactccgtctcaaaaaaaaaaaaaaaatcttgaaatgggcagatgatcctggattatctgggtgggcttaatataatcacaaggatcctgacaaaaaagaggcaggaggccaggcgtggtgatgtgcacctatagtcccagagctttgggaggccaaggcaagaggatcgctggagcccagcagttccaggctgcagtaggttataatcacaccactgtactccagcctggatgacagggtgagaccctgtctctgttcaaaaaacaaaaagacagaagaaagtcagagacagaggagacataaagatgaatgtgaaggtcagatcatgtggggccatgagccaaggaacatgggcagcctctataaactggaaaaggcaaagcgctagatccctcctgcagcctccagaaggattgtagctctgccagtgcttcattttagaacttccagaactggaaaaaaatgaatttgtgttgttaaaaccaatacatttgtggcaatttgttataatagcaacaagaaatggatacaggtgctaagaagatagcaaaatgcatgcccactgtaccttctctctcctccttcctggtcctatctatctgttatgggctgaattgtgtccttccaaaattcacatgttgaagtcctaacctccagtacttgggaatatgatactgtttggagatagagtctttaaagaggtgattaaggtaaaatgaggtcatagaggtgagccctaattcaatatgactggtatccttgtaagaacaggagattaggatgcagacaggtacaggcgaagaccatgtgaggccacagcaagaaggtggcccccaacaagccaaggagagagccctccaaagaaatcaacctgccgacactgatctcaaacttctaacctgcagaattgtgagaaaatcaatttctgttgtttaagccagctagtctgtggtgttccttatggcaaccctagcaaactaatacatgatccttcaaggcagaggtgaaaatctgcctcctttctcaaactgcctttgatcagcctgctcccagagcagccattgtctcagaatacctagtggccaagagtttaacccaaggatcacaaactcaaatgcctataggggccaggaagaactaacatgagtgaagtgcttgactataagaaactgtatttgccaattgatatggtttggatccgtgtccctacccaaacctcatgttcaattgtaatccccagagttggaggtggggcctggtgggaggtgattggattataggggtggatccttcacgaagggtttagtaccaacccttgggtgctgttctcgtgatagagttctcatgagaattggttattctcaacaggttatttactggttgtgtaaccagttacatgagaactggctagcacttacccacctctctctcttgctccttctcccaccatgagatgcctcactccgcccccttcatcttctgccatgattgtaagttccctgaggcctcccaggagctgatgccgtcatgcttcctgtacagcctgcagaaccatgatccagttaaacctctttttaaaataaaaataaattacccagtctcaggtatttctttacagcagtgtgagaatggactaatctaccaattaaacataatcagtatacactatcacaaaaatgacattcactccctatctccctgtctgcttttagttttgccacattttatcaaggatgaatacaaggaaaatcctctcttcctgaccgttcagtggggaaaagtggcagtgctggggtgagaggcacctgcttttattttttgtgttaaggaacctacaggagaggtgcgagctgagctggaaattgcaggccctgccctgtgccaaggggcagttgctacttagctctagccaactgttaccagggacaaggacaggccagaccagccagagttttccaatttttcaaaaaaactgaaaatatacatttttaaagtgaaatttgattttaagacattgataactaattttttaaaaattaactgtgttggccacctcacatccattacaacggctactagtaaaaaacaaaaccaaacaaaaacaaaatagaaaataagtgttggtgaggatgtagagaaattggagcgctgttggtgggaatggaaaacggtgcagctgctgtagaaaacagtatggcagttcctcaaacatttaaaaatagaattagcatatgatccagcaattccacttctgggtatatactcaaaagaactgaaagcagagtcttgaagatatatttgtacacccatattcatagcagcattattcatgagagctaaaatgcggatgcaacccaagtgtccattgacaaatgaatagataagcaaaatgtgacacacatatatatatatcacatgatggaatattatttagccttacgaggagggaaatgctgatatatgcaacacagatgaatcctcaggacattctgctaaatgaaataagtcagtaatagaaggataaattactgttcgattccattcgtatgagctgcaatacttagtcaaaaccacagagacagtgaaatggtggttgccaggaagtgggtggggggcaagaatggggaattagtgattaatgggtacaaagtttcagattcgcaagatgaaaaaagttctaggctgggtgcagtggctcacgcctgtaatcccagcactttgggaggccgaggtgggtagatcacctgaggtcaggagtttgagaccagcctggccaacatggtgaaacctcatgtccactaaaaatacaaaaaattatctgggcacagtggcaggtgcctgtagtcccagctacttgggaggctgagacaggagaatcgcttgaacctgggaggcggaggttgcagtgagccgagatcgcgccactgcactccagcctgggtgacagagtgagactccatcttaaaaaaaaaaaaaaattatgaaaaaagttctggaggtagacggtggggatggctgcacaccaatatgaatgtacttagtgccactgaatttcacacttaaaaatggttgaaatagtaaatttaatgttatatgtattttaccagaattttaaaaattggaaaatgacaactgagctggctaagattgttattttgaaacaagacacattttttaaggcctagcttcagctcatagtccaccagtttgcaacctctgttttaacacttccttgttttctagtcatttcatgtgttcatgtcttacccaactagaaggtaaaattccctggaagtaggaactgtgtcttaaccttctttggtatctttcaaagtgggtacttggagctttgcagtgggcaaatcacagttgccctgctgaatactggatgatacccacacactcataactaattattagacactgccatgctgtacacagagctgtggccacatgggattaattgtaacatttcaagaataagaagagagcttttgaagtacaaaaagaaattcattctgactagcaggtggggatggtgtgtcaggagagacgagggtgaagagggcagggagacgggaaaggggccttataggccacaagaaggggaaatgggaaattgccacaggctgtaagcagagggtgacgagattggattggattttgagataaatcataaaaactagagcctggaacgcccctgctaagagattcaggaaaatggtaaatgccgcttggcaacagctctccagggccacatgtgaacacaaacacacttgtttgtgttcagcgaatgaggaggttggggacatagggaagaactaggggaactcggggggcttcaacaagaggagtgaggcaaatgcacacccccttcagagcaggggctgtgtgcgcacgtgtgtatgttgcgtgtgtgcagttagagtgggggtgattcttaggtgggtctaggcaagctgacaccctaagttgcagaccatgggcagcagatggaggcgacgctaaagtccagccatcagaccctccgtgctcccctggaacacctgtaggaaaccctgagaactccaactttaaagggatccaagacactgtagccagcacagtaacccgtggcaacccctagaggttgctataacctcagcaatggggagcgttataccgaaggaacctgccggttccccagacacaaaaatggctgaaccttggtgatcacagcacatgaccaggaaccgccaatacactcatggaactgtcccgctgacaatgtctagagggaaaatgccctgtcctctaacacccttctctgagggggaaaaaagccacattagaagaagtgatatgaccaaaagacaagctttctccaaaggccaatggccttggaatgtttattaagtgttttgtctgtttgctcaagtgctatccttcaacaccgggactagaaacaatttcttcagaaataactaaccagccacaattagtaaaacttcataaagcctggagaatactgtcatcagaagagctacatttggggcagtctggggaagggtgaagtgtgaggatggggaccattatctccagaggtctagtgattaagaactgggtgactctggacagctggtcccagggactttgcacttgtggtggaggctgaattcgtcattcccaatccggatgctatgcaatcatcgtcaagtactccaatccatctgcatgtctgaatatggatggggatgctctgcactgtccccatcggccgctgggtcctccactctctctctgctctggatctctggatctcatctttctacttcctctgcaggtggcatcatggggactgtctggtgactcccctaagcaaccagcatcagacactagaaacttccagtcaagtctcctggtccctgattccaaccagacgaccacatcttcaccccaggatggactttagacctcagcagcagagacagccatacttcctgtgtgacactggggcaaccacgtttctcacaggcccccaggtggggctgagatgagagcaggccatctgaaggtgcacaaaataggcaggatgggatggaggccaagaacatcccagtgaaatgggtgctcccaatttgcatttgggaaagaagggctcccacctttcccaagccctgcatttcacatattttgcccctattctactctacactcaacccccaactctctgagttccactccacatgaccccgsccccatcttaacttgctgtgtcctcaccctactccacagatccctgcctcccgtgcctttgctccaggtgaggccatacacttggcggaggcctatttgctgtggccattttgacccagggaatgtctgatgtgaccatttgaaaacactctccacaaaattgctcgaaacactgttttatattaaaaattcaaagcaggcctaagtgaaaaagacaaacaagggacaagggatgtgggcctgatgactactgaatgtactacttagtaacaataattaaaaactaaatatttaatagtttggctttccccccagctacctaaaaaaaagcaaacaaacaaaaaaactgcctctcagactaaaatagctgcttcaagagcgccacatcaacatgtgataagtttgctcacattgttaccttcatcttcctactccctgtgtcaattacaaatggcttatgatgcaactaatggccattatcaaaggcataaggaaagacatttaagacttcacatcacaagaagtctccagacagatgattcccagcattgactcaactgctcaacggggctcacagagacccagctcctgtccggctttcttctgccatccttagctccttggcttttagttctcattctcatcacttcatggttgcaagatggctgccacggttccacgcatcacatcttcacacaaggcaggaaaaaagggaaaggggcagtagttaaaaggctgttagagtgctaggtttcctgtttaagatagcrtcccccatggcagcgcaggcctggaagcttctgcaagccctagcgctgctgccccgcttcctggtggccaggtcccgggcagttcaattaacctccagaagatggctgagcctgcaggaatgccagagcaagaaactgatgtctgataacagagtgacagttcaaagattctttgtagcagacactgcgaatgaagctctygaggccgctaagagactaaatgcaaaagaaattgttttaaaagcccagatcttagctggaggaagaggaaaaggtgtcttcaatagyggtttgaaaagaggtgttcatttaacaaaagaccctaatgttgtgggacagctggctaaacagatgattgggtacaatctagcgacaaaacaaactccaaaagaaggtgtgaaagttaacaaggtgatggttgctgaagccttggacatttccagagaaacctacctggcaattctgatggaccagtcctgcaatggccccatgctggtgggcagcccccaggagggcatcgacattgaagaggtggctgcttcaaacccagagctcatttttaaggagcaaattgacatttttgaaggaataaaggacagccaagctcagcggatggcagaaaatctaggcttcgttgggcctttgaaaagccrggctgcagatcaaattacgaagctgtataatctcttcctgaaaattgatgctactcaggtggaagtgaatccctttggtgaaactccagaaggacaagttgtctgttttgatgccaagataaactttgatgacaatgcagaattccaacaaaaagacatatttgctatggacgacaaatcagagaatgagcccattgaaaatgaagctgccaaatatgatctaaaatacataggactagatgggaacattgcctgctttgtgaatggtgctgggctcgccatggctacttgtgatatcattttccttaatggtaggaagccagccagcttcttggatcttggaggtggtgtaaaggaagctcaagtatatcaagcattcamattgcccacagctgatcctaaggttgaagccatccttgtcaatatttttggtggtatcgtcaactgtgccatcattgccaatgggatcaccaaagcctgccaggagctagaactcaaggtgccccttgtggtttggcttgaaggaaccaacgtccaagaggcccaggaaatactcaacagcagactccccattacttcagccgttgacctggaggatgcagccaagaaggctgtggccagtgtggccaagaagtgatgtctttgtcctgatccgatggagaaacaaagccatttttccataaaaagggatggttcatcattgtgaaagaaatggttatctcgttggggaggaaaagggggggtgaaggcaagaatcactgaaaaatcttaaatctgtgttttctggaataagctatctagacagcctaaatctgattttagtctttataaaaataatatctcgtattctcatacttttctgtcactgtaagcctgcccagtaggcagtgttttgcagactttggggagcggtctatgtgaccaaatattgtgtgtatagacagaatttgaaatcgggtcctgcttcatttacaagaattttggtgggcatctaatcctacataatgaaaaagaagaacagaccatttaaaaactcagacaagattatatttaatatattaattactaaaaaggcacaagattacactgaacattagctactaaaaaggcactgccaagacattcaaacaaatagctattacacactgcagcagattttacaggtttctaattccaacatatgtttgaaaaatccaygagtgttccaaaatatayttaataatggaaggtctgcattaatataccatccatgtgtttttaccatttggtttaatattgaatatactgtttacctcacactaaaaataaaaccagaaaccttatttgtgactttggagtggaagcttccatttttgggtcaaaaatgaatcctgattcttatggaaatctctgttattaagtcatttcaagatgagacaacactgaagatcaaattgtgttgggtatcagtatcttctctcctcgtttatctcttacacctcatcctcccaggatctaccagttgatggtagaaagatgggaaccttatctgaatgttttttttttccatgatgtccaattttgttgtgggaaaggatttggataaagtttttgtttaaattttggtagatttttatctatacaagtttaaataaaattatgttttgtaagttgtaaaagaaaaaaaaaaggctgttagaactgtcctgggaagaactggaccagaactagtgcagctgcggttgagatggagagatgatgattttgagatgtatttagaaggtagaattgacatgggttgatggtggtaatgacaaggaagatggttctgaggtttctagcttgggtggtggtggtgccttttaatggaaataaagagtacagaaagagcagacttggtgtaagggaaaaaacaatgaccttggtgttttcgtttgaggttctctaggaacatcctgaaccaatattatataagaaatttaaaatatagatccactgcttataaaagaggtagatgctactagctatgtaactgtagtagtatttgccacacaggcggcagctgggtccacagagggtgtgtaggaaggacggggagccacagaaccctgaagagtggtggagaggtacacggagacctggagagaaaacaccctaagggattaagcttcaaagaacaggaagaggtctccagtgttgaccaatctagaaaccaagtaaggccaggctgtgaaatgcatgcactggttttggcaattaggtggtcgatgacctcattggatgcaattcttgggagggaggtactgattctagtttacagtggtttgaggaaacttaggcagtaaggaagtggagacgttcaggaaatgtgctggagggatggacatgtgaccaagttctggctcaagagtcataaagttggtctttcgggggcacttctagaagagattttcctctctgtaaaagggaaggagagcctgtctagcatgtttttctgtgtgaggatgtgatgcctggatccagggcagccatcttgtggccaggaggggagacattactgatagacggaggccagtagagcaagagcaagaggacggctgagcatggtccttggccttcactgagctaataaatcaaccctgcagccacctgcctcccaacttctttttaggtgagaaaaataaaccctcggccgggtgcggtggctcatgcctataatcccagcactgtgggaggccgaggtgggtggattacctgaggtcaggagttcgagaccagcctggccaacatggtgaaaccccgtctctactgaaaatacaaaaattagccgggtgtggtggtgggcacctgtaatcccagctactcgggagcctgaggcaggagaattgcttgaacccgggaggtggaggttgcagtgatctgagatcgtgccactgcactccagcctgggcgacaagagtgaaactccgtctcaaaaaataaaaataaaaataaacctctgttgcttcagccactttagctctgcttgtaactggaatgtcaaggacacagctcattaggtgtgatgaaaatgaactctactgttgctcccattggccctggaaactcttcagtggggtgatattcccctactggatgaaaactctggcaggtccatgacttttgtcctcaccctcaggtaacagataacccaaagtcactttccctagccaacagatttgcagttgtggaatcagaatagtacaagatgaataaaagcctgaatctgattttgcatygtgtctccgttccatcaccaggcctgtctcaggcccacagcctgaagtgtaaagaggccatggctggtgtttctttctttttctgcctcatgcttcttctccttccacccaacgctcacccctacgaggctgctagggtgtgcttgatcccttagggccagggcgtgggaaagacaaccggtagagtctttcctaagtgggtactgctaaaagccagctggggtctctgttgtgacccaactgatttttttctcacggatacttctgcaggctcttaggagattgctactccgggattccctgcaggtctcttgaggggatgcatctgtcctggggtctcctccctcagcctcacaggggtgctgtgcccacttcccactttcttctgaggggatcccctgccctcattggactagcagcatttctctcctgagtgctgcatgccagagccggagaagcactcagcatcacagtggctgcctccagcataggcctcctgtctggcagccacaggtctcgatagctctctcacttgtcagtcaagaagtaggtctcaatgctctgtctgagacctgccttaagttgagggcagtaaaacctccatcctgggcacctcagaagaaatctgaagaaaaaaaacagttgaagaatcttctctttcccctctctcaatcctgaaaagggtgaggagttcaggaacacagggagaggccctcaaacctgcgctttggaaattctacctatagtgacttgtttttgaaatgttatcttctgtgttttagcatcttgggcaaaactggtttaatcacccacctctggaatgcttttttttttttttttttttttttttttttttgagacagagtctcattctgtcccccaggttggagcacagtggcacgatctcaacacattgcaacctctgcctcccgggttctagcaatttttgtgcctcaacctcccaagtatctggaattataggcatgagcccccatgcctggctaatttttttttttttttttttttttggtagagacggtgtttcaacatgttggccagcccggtcttgaactcctgacctcagatgattcaccagcctcagcctccgaaagtgctgggattacaggcgtgagccagcgcacccggccttggaatgcttattattgagaaaaataaacctctattgttttagccagttttggctcaacattctattactagccaccaaaagcagctgaactgcttcactgtgctgggttggcttcatgactcccctggcacaataaagacaaagcccatcatttatgatagtaaaaaactgcagatacccaacaacaggagatgaaaccaatgaaacacatacatgatggaaaattgtgcaggcacttcaagtgacaacttataggaaaaagttcatattttgctagattatatacatgcagagcaaaaagactaagaggaaatatgtaagaaaggtaaaattcaatttggttgagaaatggagtaaacatatattatatatgcatagaaaatagctggaagaatacacaatacacagatatcaacagttgcatctggggaggggtcttggggatctgggtgggaaggaaggttacttctgaatttttcaaccatgtgcacatattcttttttttttttttttttttttttttttttttgagatggagtctcactctgtcgcccaggctggagtgcaatggtgcaatctcagctcactgcaaactccgcctcctgggttaaagcaattctcaagcctcagcctccccgagcagctgggattacaggtgcgggccaccatgcctggccaatttttatatttttagcagagacaaggtttcgccacgttggccaggctgttctcaaactcctgacctcgtgattcgcctgcctcggcctcacaaagtgccgggattccaggcgtgagccaccgtgcccggcatgtgcatatattcttttctcaactgaggaaagtagtagtttcgtgggtagggttgggtggtgaaggttgtttttgtttaagttcaacgtttttggagggaaagggataataatggttttctctaggtggaagaattaatgcggatttttatctttctctgtctcttctatatttccccaaatgtctccaagtcattttgtattactaaaataatcaggaaaaaacccacaataaaatgctcttcctttccttgttccctttccttccagaataattcagttttaaagccattagcagttagttgaacagagtaaggcagggacccatggtgggaggggctggtagcctagagcagggtggccgagctcaggcatggggaggaggacacaggggagggggtacccggcagagtcatcaatccagaagggtggaagagggcttccttgaatgggcagcctggagcatgtgtcaaagccagagagggtggcagggaggtacatgcactggggccaccagcaaggttgtcttagatccaagtagggcgaggcagtcagcactgttagtacccaaccatcacccacatggtggagatgtgggcagcagagatgggaaatttgttatacagagggagtggagaaaatgagtaaatatgttagagacaatggaagtccgtgctttcactgtaggagaaagaagttacaaatatggaaaggagagcttgaataaacccagaggtgttgattggtattggaggtattagtgcgcactcatgattttcaatatagacatagatgcagaaatcagcagagatttaaatttttatataaatgcatataagtatataaataaatacagacattgtcttagtcagctcaggttactatcacaaaatacactagattgggtggcttacacaacagacatgtattgcccatagttctggagactgggaagtccgagatcaagatgctggctagggccctcttcctggcttgctccctaccttcacactgtgtccttacatcatgggacagaaagagagaatgagaaagagagactgctgctctttttttttttttttttttgagacgaagtcttgctctgttgcccaggctggagtgcagtggtgcaatcttggctcacagcaatttctgcctcccaggttcaagcgattctcctgtctcagcctcccgagtagctgggattataggcatgtgccatcatgcccagctaattttttgtatttttagtagagacgcggtttcaccatttggccaggctggtcttgaactcctgacctcaagtgatccacttgccttggtctcccagagtgttgggattacaggtgtgagccacctcgcccagccatgccctctcttcttataaggccactaatgccatcatgaagaccccaccctaataacctaatttaaccttgattaccttccacaagccccatttctaaatactatcacaattgggactagggcttcaacatatgaattttgggggactcaaagattcagtccataacagatgtctatgtatgtacctgtatcattacatactatacacacatacatatatccatatacaaaatgtattccctaccctgtctactatgacgacctgggagtggtgatgccctaatagcagagcaaacctagaatccagatcttggctttaaaatgcagttttccaccaaatgcaacccaggctccttacaagaacggtcagttctaggtctagggcaaggaaagtacaacatgagcctggagcacgtgcttgctcaaagaataatgaggacatggcaaaaggacacaaaacattgcttaaatgagttcccacagctgtacagggttcaacttgttattaaaatgaataataatcatggattacaaccctttgaataaaataggaaacagtgattccatactaatattagcaaatagatgaataaattgaaagtttggtgagaaatgggaggtacaacatacttctccactaaatcctcattaattactcatggggacaaaacatctttacagtgaaggggcctagaagacaccttaattatcaaagcaaaatcatcaataatgggacaaatggaaactgagctctatgtgacaggatgcaatgagaacagtatcatttctgtgatgttctggccaaagatggataacttgagtttaatcacaaagaaacaccagattgtgggacattatacaaaatgactggcctataatcttcaaaagtgccatgatcatgaaagtcaaggaaagatgggaggaattctttcattcaggagacaaaagagataactaaaggtaacctgtaattctgaactaggtcattttgctgcaaaggcaattattgggacaattggtgaaacttgagtggggtctaaggactggatgtcagtaagacatctatttacct

SEQ ID NO: 93992 - DNA, 13502 bp, Homo sapiens
aaaaatgaatgaaaaggaatgaacaaaacctctgagaaatatgggattatgtaataagaccaaacctatgactgattggggtaactgaaagagacagagagaacagaaccaagttggaaaacgtacttcaggatatcatccagaacttccccaacctaaaaagacaggtcaacattcaaattcaggaaacacagagagccccagtaagatattccacaagaagatcaaccccaagacacataatcatcagattctccaacgtggaaatgaaggaaaaaatgttaaggtcagccagaaagaaaggccaggtcacttacaaatggaaacccatcagactaagggcagacctttcagcagaaaccctacaagccagaagagactgggggtcaatattcaaccttttttttttttttttttttttgagagagagtctctctctcgtcgcccaggctggagtgcaatagtgtgatcttggctcactgccacctccacctcctgggttccattgattctcctgcctcagcctccttagtagctgggattacaggcacctgacacgatgcccagctaattttgtatttatagcagagacggggtttcaccatgttgaccaggctggtcttgaactcctgacctcaagtgatcagcacaccttggccttccaaagtgctgggattacaggcataagccagtgcccagcctcaacattcttaaagcaaaaaatttccaactcagaatttcatatctggctaaactaagcttcataagtgaaggaaaaataaaatccttttcagacaagcaaatgctgagggaatttgccaccaccaggcctaccttgcaagagctcctgaaggaagcactcaatatagaaaggaaaaaccattaccagccactgaagtacaaagaccaatgacactatgaagaaactacatcaacaagtctgcaaaaataaccagctaacatcatgatgacaggatcatattcatagataacattaaccttaaatgtaaatgggctaaatgcctcaattaaaagacacagaatggacagctggataaagagtcaagacccactggtgtgctgtattcaagagacccatctcacgtgcaaagacacacatagcctcaaaataaagagatgaaggaaaatttaccaaacaaatggaaatcagaaaaaaacaggggttgtgagcctagtttctggacaaaacacactttaaaccaataaagatcagaaaagacagagaagggcattgaataatggtaaagggatcaattcaacaagaagagctaactatcctaaatatatatgcacccaatataggagcactcagattcataaaacaagttcttagagaactacaaagagacttagactccccacaataatagtgggagacttttacaccccactgtcaatgttagatcattgagacagaaaattaacaagaatactgaagactcaaactcagctctggatcaaggggaactgatagatacctacagaagtctccatccaaaaagaacagaatatacattcttcttggtgccacatggcatttactctgaaactgatcacatgatgggaagtaaaacactcctcggcaaatgcaaaagaagtgaaataataacaaactgtctctcagaccacagtgcagtcaaattataactcaagattaagaaactcactcaaaaccacacaactacatggaatttgaacaatctgctcttgaatgactcctggaaaaataatgaaattaaggcagaaatcaagtagttctttgaaatcaatgagaacaaagagacaatgtaccagaatctctgggacacagctacagcagtgttaagaaggaaacttatagcaccaaatgcccacatcaaaaagctagaaagatctcaaattgacacactaacatcacaactaaaagaactagagaactaagagcaaatgaaccccaaagctagcagaagacaagaaataaccaagatcagagcgaaactgaaggagatagagatacaaaaaacatttcaaaaaaaatcaatgaatctaggaggtggtttttttgaaaacattaataaaatagaccactagctagactaataaagaagaaaagagagaagaatcaaatagacacaatgaaaaatgataaaggggatatgaccactgaccccacagaaatataaccaaacatcagagaatattatgaacacctttatgcaaataaactagaaaatctagaagaaatggataaattcctggacacatgcattctcccaacactaaatcaggaagaagttgaatccctgaatagaccaataacagttctgaaattgaggcagtaattaatagcctaccaaccaaacaaagctcaggaccagatggatttacagctgaattctaccagaggtacaaaaaagagctggtatcatttctcctgaaacttttcagaacaattgaaaaggaggtacttcttcctaactcattttatgaggccagcatcattctgataccaaaacctggcagagacacaataaaaaaagaaaacttaaagccaatatccatgatgaacattgatgcaaaaatgctcaataaaatactggcaaactgaatccagcagcacatcaaaaagcttatccaccatgatcaagtcagcttcatccccaggatgcaaggctggttcaatgtatgcaaatcaataaatgtaattcatcacatgaacagaactaaagacaaaaaccacatgattatctcaatagacatagaaaagacctttaataaaattcaacatcccttcatgttaaaaactcaataaactaggtactgatggaacatacgtcaaaattataagagccatttatgacaaacccacagtgaatgtcatactggatgggtaaaagctggaagcattccccttgaaaaccagcacaagacaaggatgacccctctcaccattcctattcaacaaagtatttggaagttctggacaggacaatcaggcaagagaaagaaataaagtgtattcaaacaggaagagaggaagtcaaactgtctgtttgcagatggcatgatcccatatctagaaaaccccataatctcagaaaaaaactggaggcatcatgctacctgacttcaaactatactacaaagctagagtaaccaaaacagcatgatactagtacaaaaacagacacatagaccaatggaacaaaataactcagaaataagactgctcatctacaaccatctgatcttcaacaaacttgaaaaaaacaagcaatgggaaaaggattccctatttaataaatggtgctgggagaactggctagtaatatgcagaaaattgaaactggaccccttccttatgcaacaattaactcaagacagactaaagactgaaatgtaaaccccaaaactataaaaaccctagaagaaaatttaggcaatacccttcaggacataggaaagggcaaacaaatattacatgattaaaatgtcaaaagcaattgcaacaaaagcagaaattgacaaattgtatctaattaaactaaagagcttctgcacagcaaaataaactatcatcagaatgaacaggcaacctacagaatgagagaaattttttgcaatctatccatctcataaaggtctaataaccagaatctgcaaggaacttaaacaaatttacaagaaaaaaaccccattaaaaagtgggcaaaggacatgaacagatacttctcaaaagaagacatttatgcggccaacaaacatatgaaaaaaagctcagcatcactgatcattagagaaatgcaaatcaaaaccacaatgagataccatctgatgccagtcagaatggcaattattaaaaagtcaagaaacaacagatgctagtgaggctatggagaaataggaatgcttttacactattggtgggaatgtaaattagttcaaccattgtggaagacagtgggtgattcctcaaagacttagaaccagaaataccatttgatccagcaatactgttactgggtatatacccaaaggaatagaaatcattctattataaagatacattcatgcgtatgttcttgcagcactattcacaatagcaaagacatggagtcaacccaaacatccatcaatgatagactggataaagaaaatgtacatgtacaccacggaatattatgcagccataaaaaggaatgagatcatgtcctttgcaggaatctggatggagctggaggccattatcttcagcaaactaagacaggaacagaaaaccaaacactatcacgttctcacttataaatgggagctgaacaatgagaacacatggacacagggaaggaaacaacacacactggggcctgttacggggggtgtgggagggagagcatcaggaaaaatagctaatgcatgtggggcttaatacctaggtgacaggttgataggtgcagcaaaccaccatggcacacttttacctatgtaacaagactgcctctcctgcacttgtatcccagaacttaaaataaagttaaataaattttaaaaagataaaaatttaaaaaattcttaaaacaaatgaaaatggaaactctacatacccaaacctttgggatacagcaaaagccgaggaatttttctttttttttttgagacaaagtttcactcttgttgcccaggctggagtgcaatggcatgatcttggctcactgcaacctccgcctcccaggttcaagtgattatcctgcctcagccttccgagtagctgggattacaggtgcctgccaccatgcccagctaagttttgtatttatttatttattttatttatttattttttttgagatggagtctcactctgtttccaggctggagggcagtggtgcgatctctgctcactgcaacctccgcctcctgggttcaagcaattctcctgcctcagcctcccgagtagctgggactacaggtgcacaccatcacacccagctaatttttgtacttttattagagacagggtttcaccatgttggccaagatggtctcgatctcttgacctcgtgatctgcctgcctcagcctcccaaagtgttgggattacaggcatgagccactgcacctggcaactttcgtatttttagtagagacagggtttcaccatgttggccaggttggtcttgaactactgacctcaggtgatccacctgcctcagcctcccaaagtgctgggattacaggcgtgagccaccgtgcccggccaagcagaggaaaatttatagcaataaatacctacatcaaaaatggtagaaagattacataaattaactatcaacaatgcactccaaggaactagaaaagcaagaataaaccaaacccagcattagcagaagaaaagaaataataaagaccagagccagaactaaatgaaatagagactaaaagaaaatacaaaggatcaatgaaattaaaagttgattctttaaaaaagaaaaacaaaattgataaactccttgctagactagccacaaaagagaaaacccaaataaacaaaatcagaaatgaaagaggagacattacaagtaagaccacagaaatataaaagatctgtggagatcttttattaaataaaaagttggagatctttttttaaataaaaaagttggagactactgtgaacaactatatgctgacaaactgggaaacccagaggaaataaataaattcctgaaaacatacaacctaccaagattgaatcaggaaggaatgaaaatctgaacagagcaatgctgaatagtgagactgaatcagtaattaaaaaaaaaaaatctcccaacaaagaaaagtccagaactggttggattcacagctgaattttaccaaacaaaacccaaataccaattgtcttgaaactatttcaaaatattaaagaggagggaattctccctaattcattctatgaggccaaccagcatcacactgataccaaaaccagagatagacacaacaaaaaaaagacaactacagggtatgcagaggtgccccaaccacactctgtccacagactctcagttattttaggagatccctggccaaagatttatttctgttgacaaccaagggcctccgtctggatttccaaggaagaaatttcctttgaagcwctggaacttgccaccaccagcaccatgccctaccgatatccagcattgaccctggagcagaagaaggagctgtctgacatcgctcacyrcatcgtggcactgggcaagggcatcctggctgcagatgagtccactgggagcattgccaagcggctgcagtcccttaacgccgagaacaccaaagagaacyggcgcttctactgtcagctgctgctgacagctgacgactgcgtgaacccctgcatcggggacgtcatcctcttccaccagacactctaccagaagaaggatgatgggcgtcctttcccccaagttgtcatgtccaagggtggtgttgggggcagcaaggtagacaagggcgtggtctcccttgcagggacaaatggcgagaccaccacccaagggttgtatgggctgtctgagtgctgtgcccagtacaagaaggatggagctgacttcaccaagtggcattgtgttctgaagattggggaacacaccccctcagcccttgccgtcatggaaaataccaacgtcctggcctgtcatgccagcatctgctagcagagtggcattgtgcccattgcggagcctgagatcccccctaatggggaccatgacttgaagcactgccagtgtgtgaccaagaaggtgctgactgctgtctacaaggctctgagtgatcaacacatctatcttggagggcatcttgctgaaccccagcatggtcaccccaggccatccctgcatccagaagttttctcacgaggagattgccatggtgactgtcacaacgctgcaccgcacagtgccccccgctgtccctgggatcacattcctgtctggaggccagaatgaggaggaggcatccatcaacctcaacgccattaacaagtgctccctgtgaccttctcctatggccgagccctgcaggcctctgccctgaaggcctggggcaggaagaaggagaacctgaaggctgcccaggaggagtcaagtgagccgtggccaacagcctggcctgtcaaggaaagtacaccccaagcagtgagactggggctgctgctagagagtccctcttcatctctaaccatacctactaagtggaggtgttccccggctgttcccaacactccaggccccgcccctactctcttgaagagcgggccttctcctcaggtctccaggttggcttgcccgtgctcttgcctccctcgtgacagtggtgtgtggtgtcgtctgtgaatgctaactccatcaccctttccagcacactgccaataaacagctattcaaggttggaggagggggggcggggagagaactacagccagtatccccaatgaacatagatacaaaatttctcaacaaaataccagcaaactaaatgcaacagcacatcaaaaagacaatataccgtgatcaagtgggatttatagcagggacgcaaggatgcttcgacacacacaaatccgtaaacatgacacatcacaccaacaaaatgaaggacaaaaaccatatgattatctcaataggcacagaaaaagcatttgataaaattcaacatcgctttatgataaacactctcaacaaactagacatagaaggaacataactcaaaataacaaagaccatatacagccaacccacagctaacatcatactgaatggagtaaagttgaacgcctttgctccaagaactgaaacaagacaaggattctcactttcaccattcctattcaacatagtactagaagtcctagccagagcaatcagtcaagagaaagaaataaaaagcatccaaattggaaaagaagaagtgaaactgtctctttttgctgaggacatgatattatatctagaaaaacctaaatactctaccaaaaaaaaccccacttagatctgataaatatattcagtaaagttgcaggatacaaaatcaacatacaaaaagcagtagcttttatatatatcagcaatgatctagctaagaaggaaatcaagaaggcaatttcatttataatagctacaaaaatatataagaataaatttaaccaaggaggtaaaatatctctataagaaaaactataaaacattgatgaaagaaattaaagatgacacaaacaaatggaaaaatatctcatgctcctgcgtcggaatacatcattaaaatgaccatattgcttaaagcaatctacaggttcaatgcaacctctatcaaaataccaatgtcattcttcacagaattagaaaaaacaatcttaaaattcatatggaataaaaaagagccagaataaccaaaggaatcttgagcaaaatgaacaaagctggaggcatcacttattacaagactatagtaaccaaaacagcatggcatttgtataaaattagacacacagaccaatggaacagaatagagaacccagaaaactgatctttgacaaagccaatatgaacttatatcggggaagcagcaccctgttcaataaatggtactgaaagaattggatagccacatgcagaagaaagaaactggacacctatatctcaccatataaaaaaatcaactcaaaatgaattgaagacttaaatataagatctgaaactgtaaaaaacactagaagaaaacctagagaaaactcttctgaaccttggtttagacaaaaaatttatgactaagatctccaaagcataaacaacaaaaatgaaaatagacaaatggaactatattaaatcaaaaagcttctgcacagcaaaggaaacaatcaaaagagtaaacagacaatctgttgaatgggagaaaatatttgcaaaccattcatctgacaggggaataatatccagaatatacagggaactcaaacaactcaactgtaaaacaacaacaacaacaacaacaaccaaaaaaccaagtaattccattaaaaagtgagcaaaggacatgaatagacatttctcaaaagaagacatgcaaatggcaaacaggtatatggaaaggtgctcaacatcattgatcatcagataaatggaaatccaagctacaatgagatatcatctcaccccagttaaaatggcttttatcctaaagacaggcaatcacaaatgctggtgaggatatcaagaaaagagaacacctgtacactgctggtggaaatgtaaattagtacagccactgtattagtctgttttcacactgctataaaggactacctgagactggtaatttataaagaaaagaggtttaattgattcacagttctgtatggctggggaggcctcaggaaacttacaatcatggcagaaggtgacagggaagcaaggcatatcttacatggcagcaggagagacagtgagcaaagggggatgtgccacacttttaaaccatcagatctcatgagaactcactcactatcatgaaaacagcaagggggaaatccgcccccatgatccaatcacctcccaccaggcgcctcttctgacatttggggattctaattcaagatgatttgcatggggacaaccatattagagccaaaccatagtagccactatggaaaatagtatagaggttcctcaaaaaattaaaaatagaactaccatgtgattcggcaatcccactgctaggtatatacccaaaagaaaggaaatcagtatactgaggagatatttgcactcccatgtttattgcagcactattcacaatagccaagatttggaagcaacctaagtgtctatcaatagatgaatggataaagaaatatggtacacatacaaaatgaagtactattcagccataaaaatgaatgagattctgtcatttgcaacaatgtaaatggaactggaggaaatgttaagtaaaataagccaggtatagaaaggcaaacttttcacatgttctcactcctttgtggaagctgagtattaaaacagttgaactcatagagagtagaatgatggttatcagaggctaggaaaggtagtggtgagggacatggggatggaaaatggtacaaaaatatagttaggatgaataagatctagtagttgatagcatgacaggggggtgactacagtcaatcataatctattgtacattttaaactaaaagtataattggattgtttgtaacacaaagaaatgataaatgctggaggtgatggatcctccatttcccctgatgtgattattacacactgtatgcctgtatcaaaatatcttatgtaccccataaatatatacagctactatgtacacataaaaaatttaaaaaatttaaaaaaggagacatataaatgggaaacaggcatatgaaaacatgctaaacatcactaatcatcaggggaatgcaaataaaaaccacgatgagatatcatcttatcccagtcagaatagctattactaaaaagacaaaaaataacagatgttggcgaggatggggagagaagggaactcttatacacttttggtggaaatgtaaactagtagagccactatggaaaatagtatggagatttctcaaaactctcaaacgagaaattaccatttgatccagcaatgctactactgagtatctactaaaaaaaatcaatatatctgagggatacctgcacttgcatgtttattgcagcactattcacaatagcaaagacatagaatcaacctaagtgttcataaattgacgaatggagaatgaaaatgtgattgctatttagccaaaaacatttgcaaactattcacactattggagtgtatacatttcctctttgtatcaaatctaccatatcaggtaggtattattattcccattttacagatagggaaaccgaggcttgagaaagtttagtctctctcatcaggctcacctaggagataggagagagacctggggtggactcaggacctctgaatgtccagcctctgacccaaccacattatgcttccttctccctttatgggaattttcattgaattgggtcttgtctttttaatttccattcatttcctcctagagagtcctgcttcagagctcactttgttggggtggcttttaagaggcaccattcaaataacattggggtgagcttctcttgccataagagctagccacaccccccttcaggaatgaaagactcatcactctggctgctgggagcatggccctcactgcccacacctacaggtctgttatctgaagagagctgcctccctagggtcacgccttcttctgggggtagctcaggaataaatccaatgcctcattgcttggtgcacagagactgggtcccctctccccagctctgagtggccacccaatgtccagagctcccagccgggtcaacagaggcccttgttgggactacccctcttctgcccagtcctgtttccttcccaggcttttgttgggagattgcaaggacatattctagataatcctcagtcctcatttttcttgcttcacatccttctaccccctctttttccctcctagacgttacctcccctctaccatcctacatttccagtggagaatcacttgagattctctgttcctccccttcccgtggtcttagggccacctcatacctacattgctggaggttggctcatctccataaacgtgggttggctccaaggtcctcagtactgggagctccctgaccacaggaaggatctcaaataacacatttctgtcttctcagaatgtgtctgctcactcactgaggaccacaccctccttaccaggctatggaaacatttccaggctccagctcagcaggggtggcctctgtaacttgaaacaaccggcagtgatggctctgggccattacaatgttttttgtcttggaaagaatacttgaaaattacaaaaattatgccatttccattgcatgccaaaagcacccaaattgcattttaatcactgtacaaaggaagccctgatacttggcttgtagattcaaatgtgtctggttttaatcaaggcgtgtgctgttcttccagttccctcacatcgggctaacgcaaaagacaccagaatccatcaccagtgctacgtcaaaasagccccagagtccacacttgcctcggcaagcggaggggaagctgccgcccatatacaaagtccgggagaaggtgagtcctgaacactggccactgccatgtgctcctgtggacctcccagggggcagcgccgctggcacgttgggccaaacaattcttctttgtaagaaactgcgcatttactatccttggacccctaagggttggtagtatccccaccccataccctggtgctctgcggcaggaactacttcctgctatggacaatcaagttaggctcctccacgaacaagaagcaacacccccttccagcccacagctcattaacatgcacctcctgcctccccggccaattcctgagcaacttccaggccctgcagtggcacaaaggagaagccagggtccatttcatacctgccagggttccccccaggccttgggccagggctctcatctcctgggacccttactggccagatgacagagttggtctacacggcctcaaaagtccttcccagtttttggctccatgagcctgtacacttttccatccttgcatccaaataaggtgttttgaaagataatttttatgactttggggaagctggaaataaggtggggtttcaaagcccggcgctgatgagcacgtggatatcctccccctcctgtgtctgctccatctctggggccaggtttcattgtctttcttagaggtcgctttgcctcatccatcttccttccacatcacccgatcccagttctgaaagcatgcagggttctaatgtgtgctctttcccttccatcccacttttccagcaagcagtgaataaccagttccccttctccgtgcatgacaatcggcacagcttggagaactctggatgctaccttgactccgtgagtatttctttccaaattattaataaaacagggaacaacacaagggatcttgattttctggggtgtgttgaagatagaggattggcctcaaaactggaacaaggtcaaaacaaagcgaggtcttaaacaagactcataacagattaaaaaaaaaatgttcaaagctctcagaattccacgccgctttcaagatctacaccagtgttctgcctaggtgtaagtgcgcttcatccttctgcaagtgccttcccataaattgtctcttttgcgagctttcttgtgaggatctgccatgggaaggagggactgctatgcgtatctctggatggcagaaccaggatccacgaggaaaggtcagaaggaggaggagcttacataatataaggaa

SEQ ID NO: 93993 - DNA, 13229 bp, Homo sapiens
agaggatcagaaaagaatgtcatcacactgaaagtatgtccaccttgcagttcagaaaagttgcatcttatatggggtttattgtctaagttagaaatgaatttagaagatagtaaaatttaccgttgaaaaaccccttaaattacccataaagtatatgggaagtatcttttctcagtaaagcccaatacagtgtcacctttcactaatgaaacaagccattgcttttgttttgttttgacttagttatttttatttttggtctcattttggctaataccagatgagctaaaatgttgaacaaattatacttgtttttatagactagaattactcttttttttcttttcaggcagagtctcactctgtcacccaggctggagtgcagtggcatgatctctgctcactacatctgcctcccgggttcaagtgattcttgtgtctcagcctcctaagtagctgggatcgcatgtgtgtgccaccatgtgtagctaattttttgtatttttagtagagataggattttgctaagctggccaggttggtttcaaactcctggtctcaagtgatccgcccaccttggcctcccaaagtgctgggattacaggcgtgagccaccaaacctggccttagaattactcttagaacagtggaatgcccacacatccaagacaggcaagttcatggagactaagggaacagtggtatcatgtctcccttctcccttgtgcttactacaagaatggcaggcagaattccctacttatttaaaatatcactgatgtctcactctttttctttatattttatttattgatttgccacaaagtttaattcacctaagtgagacgtgcatatgatgtaactccactgtacagatacacagatctttacagaagaactatttttggcaacccctatgcccctgggtagggtccagaagtgaacaggcttggtgggggattgttttcacctcttggctactcagagtacctaaacctgtccttacttatggagagcatgtgtcacaccaagatggcagtaagctggcaactgcgaagacctgactgatgcccatttgggaagccaggcaagtgaaaatggaccgaagaaacagagatggctgtcttttatgcagggcttttccataaagaggttacactggggcaaccaagtatgtgtagaaagccagagctaaacttcagcttggcattcacagttttctcttcactgagctaataggcccagagtttcgggcagagctgtgaaatagtgcttctctaatagcaaccatattattgttacataattaaaagccagctcttttgttgtttgtttgattccttttccctacagttcccacatcatttgtctgtgctattctgtttttctccaaacactataaacttgaagcaattgccctgactcgatttcagagaaggggatgtgttggaaagagcaagaataagaaagtgaccagattctgctgcagtctggtaaccccacgagtgtcagggactacttgcatgtttacttctatccttcatttgttttgattcaagcctttatgtgctgtggactcacctccctaagtaaccaggttcctcctctcgctgcaaccttgtttgcatccttcccaagaagaggctttgggaaatttttctgtaattacacttaccaaagagccatggaaccattaggatctccactgtgatgagagttaagccatagtgccatttcacacgtatacatttatgatgggatgggaacccgatacaatctctgtaggctgaatccctagttttatttccagtgagctgcttctgtgactgaagcacctctgtgggcttttgggaaccatggatgcacagatgagagagcacaggctcagagagtaagatggatttctagtgctagccaggtgaatgacacacagtgtatttcaagtttgaaaagcaaaaccatggtatctgacagtgctgattgtaatcacctcccaccactgtgcattttaaacatgagaacaaaaaacttttccaaaatttaaacttttcctaaatctttgtggtcattgctagttgttgacatcagatcctttggttttattctataacttgggctaaacgttaatatcccactaggtggaacatgtctcttccggagttgtgacaaccgaggctcagagctgtgatttttagaaaacaagatgactattaaatcctttggcctggtattcttgaatgtttttctcccagtgcttcccttgcctgtatggagcatctgcaaagtctgagcaggttttgaagtccaagagcatcccagctataaggctcttgcactgtgacagagctgcccacctccagtacaccctcagtgacctcgagtagatgcgtagggcagtcaaacccggcaacttatgccacaaccctaattccaggaagtcgtctgctaatggctaacccactgccatggtggcactggttttgcctgaggtcattgctagggcaggaatgaacagcaaccagcacagagcattgctaaattaattacagtaatctaattaattagtagctaggcttcttctgataggaaagtttcaaccagaaaccactagatgttctattatcatagcttttgtagattggatggaagaataagtaggaagaaagagtattaatgtagctagtagggaccagtgttgctgcttgtggctgaggcagtaatgctaaggctttagctcttcaaaagcagaatgaaaaggcacaaaaagcacttcaagcttgtttctgtacccagttgtccctgtattgtctacataaaatcctgtttcctgctatctgtctgtgattcctgtttattacaaattcagtgtgtctgactgatattaaacactgatattaaaatttcaaacttcacttatctgtgctgttgtgaacaggcagctgatctggcagccctcgaatgggaaacaagtgcttctgttgagctgtagcatatataatataaatgtgcctatgtgtattaaaatgtcttctgtaaacaatgagccactgacccttctttgtcagctgtgtgtgtgtatgtgtgtgtgtgtaattgttttctccagagatagcattgcgggtgcccaaagtaacccgttcttatgtctatttcctattgtgaggaatgtcccttaccagaaataatattctgtgacagagatgatgttctgcaactatggaatgcagtatagcttacttgacccacatgtataaaaactaaaaatccttacctctctagtagtcgcatttcagggaacacagcccagaattccagtttctgcctttcactatgtccctaagtccatgggcagcctatgcacctctttctttagcactctgccttcctacccctcaacatccgtgccccattccatataccaaagcagcaggcagaagttctaaggtccatcacctgggacagaaagttaacaggcaactctgaactcttgcagctaaaagcaacctctgctttaggagagaacaaagggcactgtcaccacctctcagacccacagtgggtgggcagccagcaagctgctggctccatgggcttgtcctgaaatagtaggctgttgtaagttttgtggcctccgaagttctgcatgcgaagtaccctgttgtccaggtcatgttaagtgtcctgctgtgtgcttagcagccatctgagcaaagggcaggatctagaactcttcagattctgaaaagtaccagccttaagcatgtgatctcatttcctcaggttactttggcctttttatcccccatctcctgctcatggtcggggtctcctttgtgatgggttggtggtagaagagctgattccagaaagttatttggaaccagagggccctttttagtctcctactcagcattctcattccccacctggtcaacgtgactcagccactgaacagctccaccctgaaggaagagatgtgaaagtcaatgtgtatctttcaccatttaagaagaaaaccacttcatgcctttcagactgctgcatcctgagtttaagtgctgactattgcctttaaacccactcaaatcctaaacagagctcagctgctgcctcggtcatgagcagggagaggcacttcaccaatcctgagttagagccataaaatggggctataaaccaaagcttattaaacatcaaaactcgaacttcaactgtaaaataattaattctttatgcacttagagtagcttgtgactgggattctgagcttctgtgttaaaaggtataatcactctatgctcctgtatcaagggcattgttctatcagaccaacagggggtcatcacatataaaagcaattaatcagaaatggccatcccctggtatcccatctcctccccacccgtcccaacttccacatcaccaggcaaaacattcatgccctgcaagcttgcgaatggtgccacagccacggctctttttgccttccttgcatccatccctcttcagttatcacaaattgattttctttgtggagttattgggagtccatgtggttcaggtggctcaggggccaggtatgttatccggtgtggccaattggtcccacgtgctcttctggccacagtgactaggtcaatgatgagtacatgccccaagccagactgaatcagtctttttagcgggaactattgagggactctctccctcttctgaggttactaagcaggtgaaatgaaaacctggagatgctgacaaccaactttgtcccacataaaaagagctttcctggccaggtgtaatcccagcactttgagaggccgaggcgggtggattacttgaggtcaggagttcaagaccagcctggccaacatggtgaaaccctgtctctactgaaaatacaaaaaattagccgggttgtggtggcgcgtgcctgtagtcccagctactcaggagactgagacaggagaatcgcttcaacccaggaagtggaggttgtagtgagctgagatggtgccactgcactccagcctgggcaacagagggacactcatctcaaataaaataataaaaaaagagctttcctaagaaggaagcacttactgaaggcacacagggccgaagtggaaagaagcaacgctctgatgtcagggtctagcacttagatccaactacacttgagtctgcctgactgaactttatagttgcaccagactttaaaattccactttccaatttccccctggtaaactagtttaacttttgcaatgaaaatatgatctgcacaacaaattacaactggattcagcagtgtttccctcaaaagggtgtagtataataggtttggtgggatgctaaaagatgggatgggatagaagggttcagtagtcaaaagcttgagaaccctgaattaggcaaactttgaaagacctttatcacgggatttctcagagtcttcaagttgccgatatgtacctgaaagctctaagaagagcagatatagcaaataatgcttccgtacactgattttactccttgggatccatttgataaagaatatactttggtatgggtgtaatttgagtttttcttcaagtctaggctattaaaaagaagcagaaaatgcttccaaaacaatcaaatagcaaggctttaggggaaagaccaaaaaaaaaaaaaaaacccaaaacaaaaagctttatggctctgttctggacttagctagatttatcccaaatggcatataatactaaatttgatgatccacagaagaaaaaaacttactcattctccaaagtttcaaaatggccatcaagcttggtggtcaaaactaacaactcaatttcaaaaatagaagcccccaatttttctccagacaactctgttatcagcagatctgcctgcccctcttactaaccctttcagttctactgggcaattttaatattataggtgaaaatgcacatcacacaaagaagaagactggagaacaatgttggtaatttcatagttattttaataaccaggtttacattaacagtcacgtgatgaacttttttctttaatgtcagctaaactcaaaacacagttttgttcacggttcaaacmaaacagctcttcacgttccagagctgcctcacagctagcacagatcacaggagattactgtctgtccatacccaccagacacagaactgaacacccacacaccagttttcaaagagggaacttacaatgaatgctggctgcccrgggcagcccatgagtgtatctgggactcaagctggagttttccaggggagaaagcctgggaagcttgtggcaaggaagttgggaattgcccaccctactggaaagggcttctcagggrtgagtgaaaatccaggctcaggtgtcagccctttgtggaaacatgacactctcagtatagacagtcgtgaagaacaaggctgagggattttgaagtaaacccattttcaggatgactacaatccttccacttctagaaaacttagaagtacaagaaatagctctactacgggtaactgatttaacaatttcccaaacaccctttccactacccaagcccgtggccctcagagagaaccgggatggattgccatctgggttcagaggcaatatgaggaggttggggggatggcaggggcatcctcagggttggggggcaggccaagggatgagatggcaaaggacagctttggaatcagmtagacgatccagcgtgccttcctacacttgcatgaggtgccagtgaattcgaagagggccgggactcaccattgttttcttttcctaaaccttttgtataggcctgtttgatgtgtcttatgaaacgaaacaaatctgaatataaattttaaaatagtgggagttattctcgcaattcccagggatttctatgcttggagagttagtaatggtaagtgaagaaagagaggcttcctgagctcatgttgttcctcccaagggcatttgggggttgttcccagagcaaggaaatcttgtgcagaatcaaaggttctggtggaatggttcacttcggaagtcccaagggcagtgcggatgaccgatttggccatggaagacttatcttcatggcacagagaggttgtgcagagatgagtcagactcaggggctgagtaacagcagagcagagagtgcagaagtggacsctcagaagcgagtttatgtgtgtcttttcctctatctgctggctgtggctggtactgcaacctatcccaaagtaacagcctagtcaatgaggtatatgcttcagatctggcaaactctctctgcacataaaactgttattcttagttctctgaaagacccccacatctttgaagtgtaaactaagagctacattttcccttttactacatctcccttaaaagaaaagcactacaagagctttaaaatagcaagcttccctattctaaggggaaatagtcttttttcatgatttgaacagaaggtagcttgctaggggaaatcctgttccttggctatctccaaattcctttgtagcccagtgtgtacttttctctggtcttcaacttattcaaacctgcagtcagagacaatggtttctcctaagcaattaaaaggtgtctgaggcctgctcttctcttcaaagcacttagtacacagggttacaggtgctaccacttggattccccagagcatggaagtctgatcccaggttgaacatatttcttctgaaaatgagcatcttggttctatagattcttatcttgctcacaggacttgctccaaaactgaattttcagaagcagcatgatagggaaagagatattcaactctgacagacaaggtagatcgaagcacccacactaatttctttcaggtgccccatgaggaagactgcatcatgtcacttccactcacttggggagattctaggactgagacacaaagttcccccagagtttctgctaatggaaggggaaacaggtggtttggaatggaaaggtggaaccaggtccacaaaatgtgctccctctgctcaagactgactttggctttcccagttccccacttgactttcatataagctgagatgacctattacggtaaaaattagggaacacctaataaaaccaactttcaaaaactcctatttatcatggatgtgccaggatcgagagaatcaaacacaaactgcctgtaagagaggcccttcattctgcctcatctgagctaaaatcctgacttgggatgccagaagcatgccactcttctcggtttgcaaagacagaagagtgagaggtgacctcgccgtgtttagaaggaagcgtctttaagctgtgggtgccctcaccacgtgggcctgtgctatgttctcagctgctggcttttaagagcaccaaagaggcagggagggcaagaggaagagaagtgtcatttgctctgtccctgcctggccttcccaacccaggaaagagaaggatttgaaagcaacactaagaaagaggcctgagcaaacactggcacaatcaagcaggtggaagaaatggttgggtcttggcattttaataaacgttcaaagaaacaaaatttacttgtaggggacgtgacaaagaacagaacccaaagactgcctgccttctcggcagaccctagggagctgtggtgatgtgacagctgccacagcggctatcttccatggaaataacgtacgtcatcaacacaatatacaacaccccttccactcacctgacccacccacctccctcctacatgccctaccccagcccctctgcaccctccaccttgctccaggctcccaccacccactcaccccaaataacctgcgtcccttttgttcatttccctgacgtcccagcttgtctgtccccttgtcataagatgcagcactacacacgctctcaacactatgatagagcagactcttttaccttagtggcctgtctgattgcatgcatgtaaatggggggaggggagtcaaacaaatcaaggctatgcataaacagaaaacaaagcaatattcgtaaagctaggcaagcgagcgtaacattggagaaacataaggcttgaggcttattgattctttagatcacaaccgtttggattcgctttccttcttaaatatcggtgtaccattttggcttcaaaacaatctcttcttgcttctgcccctctctttgaggaaggcttgcttaactcagagatgtgatattagaacggccgcctgggggcgccacgatgcgcttgctggctgagcgaaccccctcatccacttgggtgcctacagttggaaataaattcccagggggaaaaaaaaaacagagtggcgggtagggggatgtgggcaagagagaaactgggttaattttaagagtgcaagatatgaagtgccttgctggcctcacctcccaagaaacttccattccagtctatcaggtcttctagacttttcttatggccccgaaaactagcctctggtaggaaaagccaagttcttatctagatttcatctgacccagagcatgataataatactgggaagaagaacaatgacaaagacgtgacactcattgtggcaggcaatgttttccgtgcttaaccattatctcctttaatcctcaccaccatggtttgagagaggtgcccttatctgttttacagaggagataactgaggttctgaaaggttaggtcacttgcccaagatcccacagtgcaaagcagtgatggtcaggtctttgtgacaacagcacaaaaagaaatttcaatgtgtgcttgggtctattcagaaaggagcctctaaaagcttaagaattaaggtagccagagaacaacaacaacaaaaaaaaaaaggcaaaaactttgaaaaaaattgcttatgactagcagaatgtgacctctggcaaagttacctccaaactttaaactcttttcctttgtctttcttcccctaggtctcccttacctctttctcccatgtttctgtttctcccattccataccctttcctcatatgctgtaattttacctttaaatgtctttcttttcttgttatcttacttccttcacatttaaattattcattataggaatgcgaatctacatttatttttctccattttaagactactggttatggagcaactgaatgattattttctaattatatcagagagttcgtaaagaataggtaagactaatcacatggctaacacatagtagatgttcaatcagtggtagctagtgttagcattattataattactaggaatgggagaatataataaaaatcctaggttagaagacgctactgcaatttgagcataaaaataatttaagctatcttttaatctggacaaataaagaaaacatactatgttgcatagcgctcataggctaatgctggaaatcactatcaattcatagaggggaccagctccccgaccctgcccccaaccagggctgatctctaggcagaatcagttaccacttaaacctggtcttcggcctgactgccttgtcttactttcttaccaggaccccttgtcaattcagggacccttcctgcttgccccagtaaccttctccctaaagttgacaccagtgctaggctggaaaactccttcaggttgagttctgaggaacaccctgtggcctcagaacattgatcttccccttcccccttctcttatcttttgatgagcctgtcccactcacctgacaggctaaatcccgactgatgaagattcctcacaggtgggttcggccgagtaggagagccccgagcagagcctgcgggggtgccacctttgggggtggtggtcaggtcaaacacaggcccatcgtacatgccccttgggacggcatgcaggtctgccatctgcagccagagaagagcatgtcaccattcattcattcagcattttagggtctgttctaggtatcataaatatattagtgaatacagtgtgtggtgggagctaggaattaacaataataaagataatttgaggaagggagaagtagtataaaataaataaaggaggatgtgatgatagagtgacaatggatgtggtcagtgaaggcccttctaaatagatgagcttcgatcagaaggatcaaaggacgttgctatggggttggggttgccagagggaggaggttggagggataccggggagtggtgtggatgacagagaagccagcaaagagaagagcaagggcagacagctgaagtgggagtgattatgaaatagaagaacagcagtacagctggagcagagggataggaagggtaggtcatgacacgaggtcgcaggtcctggccaggatgggatcacatgggagctccaccctcacactcttcagcacacaccagggtgggcaggccttgaagtgagtgtctgtggtctgacccactgacctctgtctgtggctgtgaacttgccctgggactgtggagccagccagcaacttccacccagcacatgctctgctaggccttgtgccaggcactagggcctttggccatgggaaacacggtacctcctgcaaaggggcttacagtcaactggacaaacactgcaagaccacccatggcagcggcacacaacctccacccatttcttaactttggccagaggggaggcaatgaggacgcgctgccagaggagcctgaccgtgcaggatggatcatcacaagaagtcctgtcagagcctccttccctgttagtgactcaaatgccagcacagaagccgagcccatcaaatgtgcagatgctaatgattctagtgatgtgatgactgtatctgtactccccaaaaccaagaactctacatcatcaacacttccctggtttcagaatctaaatcacactcatagaaataaagggtcaatattggggaagtctccttctctattaggcccaaactggagtgtggagctcaaattccacaatcctagggtagggctaatacacatatatatacaaacacatatatatacgtatatctgtatatgtgtgtatatatatatatatatatagtgtgtgtatagaaagtataatacaataaatacaataaatataaatatgtgaatatatttatttatacgcatttttgtttttaattatatttattgtattgttataatacaatacacaatacaatataaatatataaatgtttatttatatatttatatattattctatatttatatattaagtatatataaatataatacatatattgtaaatatatatttaatttctctgcacctccattttttatacgcatgcatacatttgcacacatgtatgtatctatagacctatatatatatatatacacacatatctctgtgtgtgtttatatataaaatcagagaaataaagttttattgaaaatacagtagctaaaatgttataagtgtttgcccctgtggagcagcactggacagaatgacacagggatgtgtcggtgtggattctcggttctcaccttcagacttgaagagtcatttattttttaaaaaaatacactggccttattttgaattattcgaatttaaattatttttaataaagtactataaaaatgtgggaaaagtcatttgggaaaaaaagctctctttgaacaaaaattttcaacaccctctttaatagtacattaagtctgtgtagttgttcttggggacaagactgtcactgaatttctctgtgagagtctagagatcacagtgccctgtgttcatggttactatctctgagcgtgagtggaacacaaagctcctgcaccacctcagagctccaatgctttttaccttcctccgtgctttaatgcgcttgtagacatagtcggagaacgggctgcagggtatgaagcggccagccccctgggtcacgtgcaggttgccatcttccagcatgatcttgccctggcagatgacaaccagaggagccccgcgcagctccatcccttcaaagatgttgtactctgccgcctagaggcaggggtgagaagcaaagccacagtaagggtagagaaagaggaacgtaccttctctccttgagaccttcagtgtcatttgctgctgattcaccaggtaagccaggaaaagctcaccatgcatctgcaagcatccagtgggtagaaggcaccggagacagatttactaagacaagactaaacttcct

SEQ ID NO: 93994 - DNA, 18269 bp, Homo sapiens
  misc_feature (1)...(18269): n = A,T,C or G
ccagctacttggaaggctgaggcaggagaatcgcttgaaccgaggaggtggaggttgcagtgagccaggatctcaccattgcactccagcctggccaacagagcgagactctgtatcaaaaaaaaaaaaaatttacacacttaataacagaccatcaaaatgtatgaagcaaaaatgaacagaattgagggagaattagagttctacaataattggagacttcaatacccaatgctcaataatggacagaacaaccagatagaaaaaaaaggaaggaaatagagaactcaacacaataagccaactaggtctaacagacatatacggaacacttcacctaataacagcagacagctgctgtggaaaacagcatggcagttcctcaaaaaattaaaaatagaatggccagatgatccagcaattccactgccgggtgtacactcaaaaaaattgaaagcagagtctcaaggaggtatttgtacacccatggaagcaacccaagttttcattaacacatgaatggagaggccagatgtggtctacacatacaatggaatattactcagccttgaaaaggaaggaaattctgacccacgctacaacatggatgaaccttgaggatattttgctgagtaaaataagccaatcacataaagagaaatactgaatgattccatttatatgacgcacttagaatattcccaatggccagcccggcgcagtggctcacgcctgtaatcccagcagtttgggaggcccaggtgagcggatcacctgaggtcaggagttttttttttttgagacaagctgtgtcacccaggcaggagtgcagtggtgtgatctcagttcactgcaccctctgcctccccggctgaaggaattctcctgcctcagtctccctagttgctgggattataggggcctgccaccatgcctggtgttttgttgttgttgttgaccgagtcttgctctgttgcccaggctggagtgcagtggtgtgatctcggcttattgcaacctctgcctcctgggttccagtgattcttctgcctcagcctcctgagtagctgagactacaagcgcacaccaccacccccagctattttgtgtgtgtgtttttagtagagatggggtttcaccatgttggccaggatggtctcgatctcctgaccttgtgattcgcccacctcggcctcccaaagagctgggattacaggcgtgaactaccatgcccggccaagtagtttcttataaaactaaacgtgtacttaatatacaatccagcaattgcactattgggcatttattccagagaaatgaaaacttatgctcacatttaaaaaacaaaaacaaaaacaaaaacaaaaacctgtgttcatagcatctttgttcacgatagccaaaaaccacaaccagtctaaacgtccagtgggcgaatggttcaacctgctttggtacatccatgcaatgagtcgtgccctgcaatgaaaacgaacaacctatggaaaccagcaacaattcagatgaacctcaagggtattatgctgagtgaaaaacgtcagtgacgaatgattccgtatatacattccacatataatcatatactgatgattctatatatatcaaaagaaatcatattaaaagatcccatatatatattctagatatatatttcatataatcatatactaaagatcccatatatataaaaccttctttttaatatttatttttattattttattttgttattttgagatgatgtttcattcttgttgcccaggcttgagtgcaatggcgcgatcttggctcaccacaacctctgtctcccgggttcaagtgattctcctgcctcggcctcccgagtagctgggattacatggtggcatgcaccaccacacctggctaattttgtattcttttttagtagagacggggtttctccatgttggtcaggatggtctctaactcctgaccttaggagatccccttgcctcagcctcccaaagtgctgggattacaggcgtgagccaccacacatggcttattttttaaattttttcagatggagtctcactctgtggcccaggctggagtacagtggtgagatctccgctcactgcaacgtccacttcccaggttccagctattctcctgcttcagccttccaggtaggtgggactacaggtgcatgccaccatgcctggctaattttgtaattttttttttttttagtcatgacggggtttcaccatgttggtcaggctggtcttgatctcctgacctcaggtgatctgcccgcctcagcctcccaaagtgctggtattataggtatgagccacggcaatcagccatatatataccttttgcaaataaaattacacaggtggaaaacgtttttctttttcttttttttttgagacagggtctcactctgtcgcccaggctggtgtgcggtgatgcaatcatggctcaagtgatcctcccccatcaacctccctagtagctggaattacaggtgcacaccacatctggctaattttgtttttgtttttgtttttgtagacacggggtttcaccatgttgcccaggctgatctcgaactcctgacctcaagtcatccgtccgcctcggcctcccacagtgctgggattactggtgtgaaccaccacacccggcccgaaaaggttttcaaaataataaaatgggctgggcaagtggctcatgcctgcaattagaggcctggagacattaagtaaaccacccaaggtcacacagtaaggaaggggcagaactcagagtctcctggctgcaaagctggtgtcccttccccactgtgccttaactgccgccttacagctgggttggaggatgcctccctggtctagggtcattattacattttcttctaagaagtgtgtttctgatcaacggaactgattattttccatctatggtcttaccctttgcccccatctctttcttatggcaacagaaaatttcaccttcaagaggagcgcctcggcccggccgaagtaccgtctgggaagtgaggagcgcctcggcccggccgaagtaccgtctgggaagtgaggagcacctctggacggccacggagcaaccctccaggtgtgaagtggcagccctgtgtgtgatctttctgccctccccgagttttcattttcgatagtaaaatttacttgtaaactaaaagatttatattggggaagatgaaaggaaggaaggaaggaaacttcactttccaaaaacaaccactgggagtccgctttgtgcagcgataggtaagcttctgtgcaggaacgggcgctgctgcaccccctaccacccacgcagcctcctccctatctgccttcaggtggtagccagaggagttcagagcctctacagagagcacaacttctccagctggaactgaagggggcctgcccctccacaccggcgggtatttctcgaaaggtggagatgagagactgagaaaagaaataagacacagagacaaagtatacaggaagaaaagtgggcccaggggaccggcgctcagcatatggaggacccgcatgggcactggtctctgagttccctcagtatttattgatcactatctctaccatctcagcgagggggatgtggcaggactatagggtaatggtgaggagagggtcagcaggaaaacatgagagcaaaggactttgtgtcataaataagtttaaggaaaggtgccgtgcctggatgtgcacgtaggccagatttatgtttgactttatacaaacatctcagtgcagtaaagagcagtattgccgccagcatgtctcacctccagccataaggcggtcttctcctatgtcagtaaatagaatgtatgatcgggttttacaccaagacattccattcccagggatgagcaggagacagatgccttcctcctatctcaactgcaaagaggctttcctccttcaccaatcctcctcagcacagaccctttacgggtgtcgggctgggggacggtcaggtctttcccttcccatgaggccatatctcaggctgtctcagtggggggaaacctggacaatacccaggctttcttgggcagaggtccctgcggccttccgcagtgcactgtgtctctgggtactcgagactggagaatggcgatgacttttaccaagcttattgcctgcaaacacatttttaccaaggcacatcctgcacagccctaaatccattaaaccttgagtcaatatagcacatgtttctgcgagcacagggttggggctagggttacagattcacagcatctcaaggcagaagagtttttcttagtacagatcacaatggagtttcttatgtcttcctctttctacatagacacaataacagtctcatctctctttctttcccccacaagaacaaactccccttaaaggaatctatttaggaagattatttcaaggatacaatgtacattcattcctccaaaatatgcttagatgaacttaaataatcagaaagttgtgtgtgtatgtgtttcacattttcttggtccacacggaaccccttgagaggtccctgtgggccgtgagcctgtttgtagacacttgcttccaccgcttgatgtcgcagacatcgcagtccctgatgtagggtctggccctatggggcttagtgggtgttctccccgtgtgtggagatgagaaatcgtaaaaagtaaagacacaagacaaagagataaagcgaaaacagctgggcccgggggaccactaccatcaagacacggagatgggtagtggccccaaatggttgcgtgcactgttatttattgcatacaagacaaggggggcagggtaaggagggtgagtcgtccaagtgattgataaggtcgagcaagtcacgtgatcataggacagggggcccttcccttataggtagccgaagcagagagggaaggcagtatacgtcagcgttttcttctatgcacctatcagaaagatcaaagactttaagactttcactatttcttctaccgctatcttctgagaacttcaaagagggaccaggagtacaggaggaaagtggacaaggagcgtgaccattgaagcacagcatcacagggaggggtttaggcctccggatggctgcaggcaggcctggatactatccagcctcccacaagaagctggtggagctgagcgttccctgactcctccaagaaaagggagactccctttcgtggtccgctaagtaacgatgccttcctaggcactggcgttaccgcctgaccaaggagccctccagtagcccttatgcgggtgtgacagagggctcacctcttgcattctcggtcacttctcacaacagcccttcagcacctgaccctatacccaccggttatttcttggttatattagtaatacaataaagagtaatattaaaagctaatgattaataatatctacactaatgattgataatgtccatgatcatctctgtatctaatttgtattataactattcttattgtaagtatattctttattatactgaaacagtttgtgccttcagtctcttgcctcagcacctaggtaatcctccgcccacatctctgaggggctgaactgccccccaccttctggaagctgggaggttggaagaggggatgcgtgcgatggactcagcacacagctgggaactcgaggcacacctaagccttcgcttgtgctgtgcggagtccacacttccttccccactggggtctcaaaacctcccctcactcaacagggtggtgctgctcaaagctctgggcacacattagggctggggagggggtggtggagagggggctccagcctgcccaaccaccaggcaacggggcacctgcccctctctcagctgggtctggacccgcgtcccaggctcaggctgcaatgcctttctctttctctttctcttctttttgcagttccgttgggtcctgcccaggacagataaagacagagcagcctgtctttatcggaggttcctctgccagtaggaggggcccggagaaaaccagaaagagggccagagccagagaaacatgaagcaccccggggcctcccacaccagtgcctgagcaggaatggggaggggccatgattcacaaggccctgggaggtcactttaaagagggctgctcaactgcaaggacgctgtaagcaggaagagaagccacagcgcttcagaaaagagtgggacagggacaagcatatctaagaggctgaacatgaatccacagatcaggtacctctgcacgctttgtccgccaggcccctcctgccacttcctgccaggcggtcctgctgggcctcagccctggcctccccctgccccagccccacctctgggctccctccccsctggttcccccgctgcccccactcccagccaagctccttgccctgctgtgtggtcccacgactgctgcttctgaatgggccaccttccccacttgccccagcccagtccgcctgctgagactctcccccgaaaatcatgcccgggctggtgcttcccgccctgggagggtgcttcctctgtgtgcttcccactattcctgggagctctggaactgggagaattgaaccaaaggatgatttgagcaatcaggcattttgttctcagcgctttggtgcaatttctgtaagatttactttgtttcaatacaaagtcttaggagagggtgtgggggagggaatggtctctgtaccagaaaataagtcacttcttccaaagatgcctccactgtgagcagagtaggatgcacacgaccccagacacaggctcctcctctgtgagcacckttcacctttcagaatgacacctgcaacatggagtgtaggaaaaaatatgatgatcaggagaaatgctcttattttaggccaggcacggtggcttatgcctgtaatcctagcactttgggaggctgaggcgggcgggtcacttgtggtcaggagtttgagaccagcctgactaacatggtgaaacctcgtctctactgaaaatacagaaaattagccaggggtgctggcgggcgtctgtaatcccagctacttgggaggctgaggcaggagaatcccttgaacccgaggggtggaggttgcagtgagctgagattgcaaactccagcctgggggacagagcgagatgccgtctttaaaaaaaaaaaaaaaaaagtagcagaaaaactgggaggttgagggtgttccattggtagccccagagctggggttccagctaggagaggtcaccccggccctgctgcccctgccagcgtcccctcctctttctctctccccgtcttcctgcctgggaaagcagcagacattctcagggctgtggagggatgggggaggcccagagcccagggacgtccaggcagctgtgttcagtgggcatcagccctgaggactcyggtgcgggggtctctgcattggggtttctctcttgtgccttcagaaacccgatgaaggcaatgtatccaggcacattctacttccaatttaaaaacctatgggaagccaacgatcggaacgaaacttggctgtgcttcaccgtggaaggtataaagcgccgctcagttgtctcctggaagacgggcgtcttccgaaaccaggtagcaccaaagtcctagttacaccctaaataggagctaagcagctgggaatgcagaaaacgcaacaataagtgatgtgcccggcgtgggctctcctgtgtgcactttyctgccacatttctatttttttttttttttttttgagatggagtctcgctctgtcacccaggctggaatgcagtggtctgatttcagctcacggcaacctctgctttccaggttcaygcgattctcctgcctcagtctcccgagtagctgggattacaggcacctgccaccatgcccagccaattcttttgtatttttagtagaaacaggattttgccatgttggccaggctggtttcgaactcctgacctcaagtgatccaccagccttggcctcccaaagtgctaggattacatgcgtgagacaccatgcccctggcctcctccccacattatttatttatttatttatttattttgagacggagtcttgctctatcgcccaggctggagtgcagtggcacaatctcagctcactgcaagctccgcctcccgggttcacgccattctcctgcctcagcctcccaagtagctgggactacaggcgcccaccaccatgcccagctaattttttctttttttctttttttttttttttttagtagagacggggtttcatggtgttagccaagatggtctcgatctcctgacctcatgatccgcccgccttggcctcccaaagtgctgggattacaggcatgagccactgtgcccggcctccccacattttttaagtccatggcccagatcttcctccctgactctcctgtgatcagatcgtggagggggtttgcttcctcccaaaaggccttgtttagcgcccagcaccctcactcttgactttgtttcccaaaatcttgttatggagctgtgcgtccggcagtcctcgggaatcagcagctgtgggaagcggggggtgttgtgtccagcgctgtgtctgggccagtgactgcgggctggtggggccgcccccgccactgccctgattcctcagcagaaggcaggcagggaacaaagctgaccccagagagccaggccatagcaggggctgaggatgcctggtgaatggatgcctgggagaaaagatggcagaattcacacatgagtctatgagacagggaaagamtcaataaaataaagaaggaaggggccgggcacggcgcggtggctcatgcctgtaatcccagcactttgggaggctgaggcaggcggatcatgaggttgggagttcgagaccagcctggctaacatgatgaaacccagtctctactaaaaatacaaagattagccaggtgtgggggtgcatgcctgtagtcccagctactcaggaggctgaggcaggagaattgcttgaacctgggaggcagaggttgcagtgagccgagattgtgccactgcactccagcyttggcgacagagcaagactccatctttgaaaaaaataaaaataaaagaataaagagagaaggagaaggatagaagaagggaaactcaatgaataaaacaccctggggcctactatgtagccagaaaaatgaaaagtaaagaaataaaataaggcygtgcatgtggtttatgctcatagtcccagagctttgggagggtgaggcaggaggatcgcttgagcccaagagttcaagatcagcctgggcaacatggtgaaaccccgtctctaaaaaaattatttaaaaaattaggcaggtgtggcggcatgcacctgcatcccagcttatcaggaggctgaggtgggaagattccttgaacctgggaggtcaaggctgcagtcagcccagatcccaccactgcaccccctaacctgtgcaccagagagagaccctgtctcaaaaatgagtaaataaggaaayggcccggggctccaggcccgccctctgctcccatcgccccacccctgcactcctcctgctcctggtctgagctcccctgtcctcctcctcctccttcgccaggtggattctgagacccattgtcatgcagaaaggtgcttcctctcttggttctgcgacgacatactgtctcctaacacaaagtaccaggtcacctggtacacatcttggagcccttgcccagactgtgcaggggaggtggccgagttcctggccaggcacagcaacgtgaatctcaccatcttcaccgcccgcctctactacttccagtatccatgttaccaggaggggctccgcagcctgagtcaggaaggggtcgctgtggagatcatggactatgaaggtgagacgtggggggctgaggagagtgggtgcaggarggacagcatgaggggcagatggttctccaatgctgtggggcgggtcagtgtcccctgggtgtctgtggggaccgggccngcgcccactgcaactggcagcctggatacctgggctgggasgggagggcccagggccnggagagaggcctgctrggccctcactgttttctccttgttttttctcagattttaaatattgttgggaaaactttgtgtacaatgataatgagccattcaagccttggaagggattaaaaaccaactttcgacttctgaaaagaaggctacgggagagtctccagtgaggggtctccctgggcctcatggtctgtctcctctagcctcctgctcrtgctgcacgggcctcccctccaccctggacccgctctgtttctgcctggtcatcctgagcccctcctggcctcagggccattccacagtgctcccctgcctcaccgcttcctcctcgctcttccagactcttcctgcagaggctcctttctgcctccatggctatccatccacccccacagaccccgttcctccagcctgcgtgcccctaacctggcttttcccatctccccagcataaccaaatcttactaaactcatsctaggctgggcatggtgactcacgcctgtaatcccccagcaatttgggaggcaaaggtgggagaatygcgtgagcccaggagttccagaccaggctgggtcacatgacaaagccccatctctacaaaaaaaaaaaaaaaaaaaaaaaaaagccagatgtggtggcatgcatctgtagtccaagctacttgggaggctgaagtgkgaggattacttgagcccgagaggtggaggctggagtgaacagagatcgcgccactgaactcgggtctgggcaacagatagagaccctgcctgaaaataaatcgataaataaactcaacctaaacaggtgtgaatatatgtaagttgaaaacccgaagttttgagaaacatcctttgtaaatttcatcctatgaattgggtcattcatgtcctacccagctaaaacagaggccaggagccagggaggaaaagcagtcaggccacacaacattgtttccgaaatggacttctctgcaagcctgactcctgagactgtgcattgtaccctgaaaccagctttatccatagcttctgcgataaatggctgtaagtcttggactccttgctccaaacgcagcgactcagcaatagaacctcccagctcccagcccttcctagtgcccatgggctttacatagggcaagagaacatttctccttctataattgccatctctttgctctctcaacatggtgaacaccatccggactccgtgtatgtctcaaattacaattctttctttgcaaatgaaatatgaaatttagaggctcttctaaacactttaaatttgatttgacattttcaaagcagatgtaagttttagagaatgagattctccataaaaatgaccctttcatgctgtggcctccatagaagatgtcccaggccaggtgcccacatggcaggcatttattttctcacagatctggaagctgcaggtccaacttcgaggggtgggtggggttgtttcctctgaggccgctccttctggctggcagggagtctcttccagccgtgtcctctgtggcctttcctctatgcacacgcacctctgggatctctctgcctccaaatatcatcttttttttttttttttttttttttgagacagagtgttgctcctcttgtccaggctggaatgcaatggcrcaatctggactcactgcaacctccgcctcccgrgtttrrgcgattcttctgcttcagcctcccgagtaaaaggcatgcatcaccacacctggttaattttgtagttttagtagagatggggtctcaccatgttggccagactggtctcgaactcctgacctcaggtgatccgcctgtctcagcctctccaagtgctgggattacaggcatcagccactatgcccggctgggatcatatgttccacacatgtttgttcaataagcatggactgcaaccacctacatgaatattcatagctcctcctgtagcctgttgaatatgtatgtttagccaacctcttcagcataaagctcctgcccaaacccctcctgctcctaaatgtctgtctctggtgttaaccagaggctgctcttcccaggctgctggatggytaccttgcaggctgtcacccttaacaagaaataaagtgtcctttgcaaatgcatcccttgtgtaatttgtaggtcaccgcgccatgggaacacgctaccatgggaagggagctgtgagacgcgcagggaggctccagacaggctggcctgggacaccagccgctgcccttccataacatggggacaagagagggcaaaagttcagcccaacacggaggatcttcgggcaggagatggggaagaaggagaagcaggaaggaaagagctcagtgtgggggcgcgcatggcatcccggtgggacatctgaggcccacacccacctgctgtccctccctcccacggtggccaccgagggtgaaggcctggggggaggcagacgcctggccctttactctccctccctgtccccatggccgctgggtgggggccgtctctgggatgatccccgagggcaggatccgggagtccctgcagaggcatcagcctgtctgtcttgatggtggagtggcggctccagctgggcgggaccaccaggggaggggcttgtgctctgctggctcagcctggtgtggacccacctcccgggcgctggctgcaatgactttctctttccctttgcaattgccttgggtcctgccgcacagagcggcctgtctttatcagaggtccctctgccagggggagggccccagagaaaaccagaaagagggtgagagactgaggaagataaagcgtcccagggcctcctacaccagcgcctgagcaggaagggggaggggccatgactacgaggccctgggaggtcacttttttttttttttttttttgagaggaagcctcgctctctcacccaggctggagtgcagtggcaggaacttggctcactgcaacctccgcttcccaggttcaagtgattctcctgcctcagcctccagagtagctgggattacaggcgcacgtcaccacacctggctaatttttgtatttttagtagagacggggtttctccatgttggtcaggctggtctcgaactcctgacctcgtgatccgcccgcctcggcctcccaaagtgctgggattacaggcgtgagccaccgtgcccggccgggaggtcactttaaggagggctgtccaactgcaaggagccgcaagcaggaagtgaaaccacagcacttcaaaaaaagagggagactgggacaagcgtatctaagaggctgaacatgaatccacagatcaggtaccgctgcccactatgtccgcagggcccctccggccccttccttctggtggtcctgctgggcctcagccctggcctccccctgccccagccccagccctggacttccttccctctggcttccctgccgcccccactcccagccagactccttgccctgctgtgtggtcgccccactgctgcttctgaatgggccaccttccccacctgccacagtccaggccccctcctgagactcttccctgaaagtcatggccaggccggtgctccctgccctgagagggtgctccctctgtgtgcttcccaccattcctgagctcaggaactgggagaattgaaccaaaggatgactggggcaatcaggcattttgttctcagtgctttgatgaactttctgtaagatttactttgtttaaatacaaagtcttaggagagggtgtggggagggaatggtctctgaagcacaagataaatcacatcgtccaaggatgactccacagtcagcagatgtccccagacaggttccactccaaggtcactcttcatcttttagaacatgaccagtaacatggaatgtgagaaagaacgcgatgatcaggagaaatgctcttattttaaatttagtgaaaagagagcccagtccccaacagctttctcctgcagggcccgtgatgcagaggctgcacagggctggcctggaaaggggcccctgctccaactgtccccagctctgtggcctgggcaggttaccccacctctctgtgcctctgacccctcctctgtaagatgggaatggtccctgcaggcctagggcagcctcacatgagcccacccccacgcagcacttagaagagaggcctgggcctcagaattcggttctaccatgattttaaaataatgttaacacgcagagtgaaacatcaggaaggaattgagctgaaaggttaaaagctatcttttaagggtgaagagttttattctcttttgcattttcctaatgggttggggagtgggtgggcagaaatactgagagggtggggaatatacccctggaaaggccagagttgggcccgagctgggagagatcaccccagcccccctgccagcatcccctcctcttcctctcccctcagtcttcctgcctgggaaggcagcagaaattctcagggctgtggaggggtgggggaggcccagggccgtcccgggagctgtgttcagtggacatgagccccgaggactccaggagggctccctgcatgggccggtttctctcttgtgccttcagaaatccgatggagcggatgtatcgagacacattctacgacaactttgaaaacgaacccatcctctatggtcggagctacacttggctgtgctatgaagtgaaaataaagaggggccgctcaaatctcctttgggacacaggggtctttcgaggcccggtactacccaaacgtcagtcgaatcacaggcaggaggtaagcagctgggaatgcagaaaacacataagtaaaatgtctggcggcgggctctcaactgtgtattttttccccacatttatttattttttctatttatttatttatttatttattttgagacagagtctccatctgtcgcccaggctggagtgcagtggtgcgatctcagatcactgcaacctccacctcttgggttcaagcgattctcctgcctcagcatcctgagtagctgggactacaggtgcgtgctaccacgcccggctaatttttgtattttcagtagagatggggtttcactgtgttgagcaggctggtctggaactcctgatctcaggtgattcacctgccttggcctctgaaagttctgggattacaggcataagccaccgtgcctggccacttcctatatttcttttttcttttctttctttctttttttttttttttgagacagagttttgctcttgttgcccaggctagagtgcaatggctcaatcttggctcattcaacttccgcctcctgggttcaagcgattatcctgcctcagccacctgaatagcagggattacaggtgcacgccaccgcgcccagctaatttttttgtatttttaatagagaagggatttcaccatgttgtccaggctggtcttgacctcctgacctcaggtgatccacccaactcggcctctgaaagtgctgggaatacaggtgtgagccactgcgcctggcctccacttcccacatttcttaagtccgtggcccagaccttcctgcttgaccgccccggccaccgcccggattcctccttggcaaagatgcctcatcacagtttggtgaaccctcactcctcaccctgccacccccactggggacactaagttccccgccttgtcccacccatccctacggccccctccacccagggaggagacttttcagagtgtgtttggggagggagtcgtctgtatgctgggcagtcctggcctacagcggtgctggccacggaaacacccaggactcaggaatgaagcacaagtgtttccagtccccacacgctaaaaaggcgacaagaaccggtgaaagtaattttaatattctatttaatccagtgtagctaacatattacttcaacgctgattaacataaaattcttcgcgagatagtgaagtttctttttcttctcacactgaaatgagtggtgtatttttgatgtgccgaggtctctcatcagagccctgtttcagatgctcagtagcgcccttggccagtgccccccaatatgggacagcgcaggtccagtggcctccccagtggggaacaaggcggaccccagagggccaggacacagtaggggctgaggatgcctggtgaatggatgcctgggagaatggatgccagaattcacacacgaggccatgaacagggctgggaaaacttccaaacacagggaagcacgtgtcttggtgcaccttgtgatgcttcaacagcaggactgagacggggacatttacagtgaacagaaatgtgttggctcgagttctggactccaggaagtccaacgtcaaggcaccagcaactttccagggcctgcgagctgcacagtcacatgggggtgaaggttgttgccagaagctcaggggatgctccagacagagtggcctgggatgtcgagtcactggtgctccgtgacatggggacaagaggaagcagtttagtctgacatactgcccccccagctagagggcaagagacagaaagaggggctgaggtcacctttgaataaccacagcagtggcacccacaaaggtgcagtccccacagcctcatagcctcttctaggtgccacctcttaaggccagtaccatagcaattaacactgaaggtcagcttggagcagacaatcactcaaaccaaacaggggggatggaggaaaggagcttcaatggcaagatcccctgggctcctgtcctggcccctcctccccctgccccaccccgcacccctcctgttcccccgtcccagagcttcccctgcccctgctcctctcccaggtgtatttccggtttgagaaccacgcagaaatgtgcttcttatcttggttctgtggcaaccgactgcctgctaacaggcgcttccagatcacctggtttgtatcatggaacccctgcctgccctgtgtggtgaaggtgaccaaattcttggctgagcaccccaatgtcaccctgaccatctctgccgcccgcctctactactaccgggatagagattggcggtgggtgctcctcaggctgcataaggcaggggcccgtgtgaagatcatggactatgaaggtgagaggtgcaggggtcaggggagcatgacggggaggaacagcctcagagatggatggatctgcaatgccatggctgggggtgttccagggcagcctgcaggggtggggctggcactgattgcaactgacagccaggagaccaggcctgggagggcaggcccagggtcaggggagagcctgagtgcttcccacctcttcatctcagactttgcatactgctgggaaaactttgtgtgcaatgaaggtcagccattcatgccttggtacaaattcgatgacaattatgcatccctgcaccgcacgctaaaggagattctcaggtgagggtctccctctggcctcatcgtctctctcctctcgcctcctgctcatcctcctgaggactcccctggctgggccctcctgccctccgtcctgcccccctgcctgccctcatggttacaccccctcacccacactcctcatgctccctccaccttggtgcctcccccctgctttcctgggctcttcctgtgagtgagaggccccttctgcctccagagcgacctccatccacccccgaggctgccctccccacagcctgggagccccaacctggctccttctatctccctggcataaccgaatttgtcataaaactggacgtagtaagtgggcatgaatagtcacaagcccgacagtcggaagctttgagcaacatccttcaaggccgacctgagcccctgagaaggagccgccaccatggaaacagagcttcaggcttccgcggccatagaagatgcccccgggccgggtgcccacagggcaggcatttattttctcacagatctggaggctgcaagtccaaggtggaggggtgggtggggttgtgtcctctgtggccgctcctcctggctggcagggggtcccttccagccctgtcctctctggcctttcctctgtgcacctgcactcctggggtctctctgcctctaaatgtcctccttgtttatggacccca

SEQ ID NO: 93995 - DNA, 12581 bp, Homo sapiens
gggagatgagcttgctgagtttcaaggaacagaaggaagcctgagtggctggagtagagtgggcaaggcagagtccccaggggcggtgctggaggggccccggggtcatttgtcatcaccctgtctgactctaggctctgccaaggcccccttcctggcatgccagccgattgcccccagaaacagggcctccatttccttttgcctcccccagtacttcatccgaggctttgcaccagggcccctggaagccccaggcccatgggtgggcaggagccttctggccttctccagacgtcccagccctgactttgccttgaccacaatgtgcagtgggcccagggccaggccagggctgggggaggccggtttccctcttgctttcatctgcaggcaagatctctttcatcgtatctgttgtttttaggccatgtgttgggctgtggacagtgaatgagagctcaggaacacacgcctataaatctgcatggaatgaaagaaaggtccaagcatcagggcgcctgacgccccacgggccctcccccttcccccgtccatctgaggactccttggggtctgatgtcaggggacaagctaagaaaactaaggaacaggggtgggtggcagacagatgagacctggaagggagcccagaaatatcaaacccagcacaagacgggtgggggactcgctcagcacattcggccagagccagaacagaaccagggtctctgacgccgtcccatgaaggacctgagcacctactggatgctgggccctggaaggaaatgaacaatcactgtgagaaatgccccgatgtgggatggccacctgactgagcagagccaggaactctgggccagttgggtgaccttgggcaagtcgaaacctccctgagcttttcgtctttcttctctgcaaaatgtttctgccagtgatgttgggaggttctaaaatcacatgaagccacctatgttgaggggctcttggagctgctgtatctgtgcaagcctctgaatcctgtttttaaatcatttgttatttttttaaccagttaggcatggggcttcatccttgtaagtacatcccatttctgtccagcctgagttaaaggtggaggactgggaaacagactaactcacatgaaacatagagcaaacagttcagcattaatcctgcatctgatatctcctcctatgcctccacagatgggcagcttactaccaaacaaggctgccgttttccatggtgaaatagcactaatgggttataaagcgccttctacaccaaggtgcagtcagctcttgctcctgacgccactagacctacaataagcctggttactcacccattttcatggtgatccttctagaatcctctggccttgagtatgcttccctgccagctcccagaacccaggctgactctagtttctgaagcctttctcatctctcttgagttttctacaatgagcatgtgctgctttttctatttttcaaatagattatattatttgtgataaccaatcaatacagaatgcaagaagaggaagtgaaagtctccctatttttctctctccaaacctggctccatgcaaggcccagcggcaccttcctcccggcttctctctccctttggttatgtattgtttggaagcacagattagcactgagaatgcagcaggcagcacaggggagaggttgagagcacaggtgctggagcctgcctgtggccagggcttgaatccctcccctgaacctcagtctgctcatctgtaaaatggggtcattagggtacctgccgcacagggtcattaggaggatcgagtgagtccatgcacgcaaagtgctcagaccagtgctgggcgcacatgagccattataggcgttttgctttgtttgtttaattaaaaacgaatggcaccacacgtacatttcattctgtagattacatgttcatcatggacagctctccgtgggagctcaggtaggcctatctcatcttgccaacagctgtagagctgttctgtgaccacactcatgctttatccacgttaagatcaggaaaagtcacttttaagaaaggacccaaggtggggcccttaagcagccttctgccactcttggtatcatttagtcccaaggaaatcctttggttctctcctcggtggcccatggcggccctgagccggccaagccagctccaggaagtgggaaccaggccctgaacaagaagacagctgggcccaaagagggtttgtccccagggagaggttgggtacagatgagaagcgaccaggctcctcccggtgtggccagaacccctcagagaggatcatgtgggcagggctagtcacagaaggcttcctggaggaggcagggtctgagtggggtcttgaagagtaagagagagctgaacagacagaagtgggttgggggagaggcactcgtggcaaagacaaggctgtttgggctggtgaggagttaggatgtctagagccaaagggccacataagggaaaagggagagtaccttgaacaccaggatgcatgtgggtttgccctgccagcagtggggagccacagaaagttctggatgataacaaataataacactctgtgtgaccctgagaaggctcgaagcctccccaggcctcagctgcctgtgggtgctggaatagacccgagggaggcagaggggactacttaggggcaggaatttgggatcaggccctgcttcctctaatcaaggggacccagaagtgtgagggcagtcccagaggtcagtccctgccttcagatccccactccacagaattcaacgtttcctttccttttaacctgccggctttccagggaaatctgattttgcgagcatgttttcttagccaggggaaatgagcaccatgcaaacaacgaagacggctgcgtgtgataaggggctgggctgctccagtgtggcctggaggggaaagagggactggtcactgctggctgccttaggtggagagaagacatcaggcctcagaatgtctgagctggagggggccttgggaagtgtctagccacagatgtgaaagtagaggcccagacagggaaggggcttgcccagccagcatggagggcctgagtctgctgtggctcatgccccacactccagctggaggggctgcggtgggactccctttctctctgtagcaggctgggccagttgaacccatgctgggattcagagtctggctgatggtggccctgctgggtcctctctggtgaagattcacagagggagggaggagctgggcacttgaggtcaagaatgagggagatgagcgtgacagggggaaaagggggaaaaggtatgtcctccaccttggttttgagtcttgttgagaaaaggacagggaaagatgcggcccaagtcattgtcatggagaccatgcaagacccagggccctggaagggctgccttagggcccaggtgacagtttgcaaactggagttggcctaagcccactgcttgaccacctccatggtgatgtggcaaacatggcacctccatggccatgacaaacgtggcacctggaagctcagggtgaccagggtggagggtggccacacctggtgcagcgtttttgcaggcgcgcctgtggccaatgcagtcaccaggcatctcaccaagaagtggagaaaactcccggctggggtttggacaccacttggggaggcgccgggagtaactggccttctggctggggctggggaggggtgtttggaggggatgaggtctaagaaacttcttcatctggatattaacataagtgtgacctgggtacctacaggctggtgaggcctgggcacagcagaattccagtgagttgccatcctcctgcattcagcagcagggccagaagctccaggtctgctggggggcccctccactcaggaagaacacacctcctttgccccctggaactgtgttgggagttttcacaacctgagggggttggtgttggttccatttttgagataaggaaactgaatctcctaggctactgtgcaagtgacctcacgtgtgactttcctttcttctcaacaaggttgtgctttctctagaagctgttcatggtggaatttctaatgttgcaacagactaacagcagaggacgttgctgggctatttgggctcctgggggcacccacagcttcagctgagcaccagtaaagagtaccagcttcctttgcagccccccattctacccccatcagtgactgtgggaaccacggatgtggggtgttttcctacatgatttcatcttcctgaggaccattctacacagaatgggctgcccccagggaggcccagtcacttcccatccccgctattcttgggcagtaagatgccaaagtcagttcagtcaacatctcgcacacaagactggtacaaccgtgacattctgacctgacttaaccccggacagtgaaccaggcactttcctcttccaggccattattctttctaatcccctttgggcaacctctctgagcctcagttttccctgctgtaaaatggggattcatagagacaacacctcataggcctgttatctttctccaaggcctgactttgtcactgaacaaactcagagacagaggttcagctgggtgcggtggctcacacttataatcccagcactttgggaggctgaggcaagtggatcatttgaggtcaggagttcaagaccagcctggccaacatggcaagaccccatctctactaaaaatacaaaaaattagctgggtgtggtggtgggcacctgtagtcgcagctactcaggaggctgaagcaggagaatggcatgaacccgggaggcggaggttgcagtgagccaagatcgtgtcactgcactccagcctgggtaacagagcaagactcggtctcaaagaaaaaaaaaaaaaagatatggagattcacttgcttcttatcctgcgagctcccacccaagtaccctgtgggcttcccatccaagccagggccaccagcaacccacaagagaccatgcagctctccggacccggatcctgatacctttacttacccaattacttaccatgacctcagaaaagtcccgtagcctctaagtgcctcagtttccacatgtgtagaatggggacagtaacagtacccacctcataggatgaaatgaaactcagcccagggcctagttctcaattgctacataatacatggcaaacttgagtgcaactgggaagcacagtgagtatggggaatggaaagtgtttcatccccggggaggccacatcaatctcactttattagatcataagtgcttttaacaaggcaaacagcagaaggccagcagcccgccagccagagccaagaactgaaatccagttctccaagaccccggacatcaaaacaacaatgcaaaaggctgaacatcaaagaatgaacagcaagtccaaacatttcactgtgctcttatcttaattaaagcaagtcatactcagagttttggatgacacaagttgaaaagcggggtctggttttattagcttttgctgacacccacagagaagtctgtgacttacccaaggtcacccagcaccctggggccagagttggggtccaaaaccaggcctcagctgctggagccggcgcgcctttcataacctccctgcccccaccctaacctgagctacagggacccagggttgtcatttcaggggagaggtctccgttcattcatccagctatatattgaatcatgtttattgaaggtcttctgctttctaggcactgttctaggctctggggatacagcaatgaacaagacaatctaaacggttggggaaagcagacatcagtaaataattacgtagataatcatagtcacacgttacataatgacgttttggtcaacactgcaccgcatatatgaccatggtcccataagatgataatggtgcattcgctttgcagacactgccaccgccgggagccccgtactatcagccatggtcaaccccactgtgttcattgatggtgagtccttgggccacgtctccttcaagctgtctgcagacaagtttccaaagacagcagaaaactttcgtgctatgagcactggagagaaaggatttggttataagggttcctgctttcacagaattattccagggtttatgtgtcggggtggtgacttcacgcaccataatggcactggtggcaagtccgtccaccaggagaaatttgatgatgagaacttcatcctaaaacatacaggtcctggcatcttgtccacggcaaatgctggacccaacacaaattgttcctggtttttcatctccattgmgaagactgagagtttggatggccagcacgtggtctttggcaatatgaaagaaggcatgaatgttgtggaggccatggagccctttgggttcaggaatggcaagaccagcaagaagatcaccattgctgactgtggacaactccaacaaatttgacttgtgttttatcttaaacaccagaccattccttctgtagctcaggagagcaccccaccaccccttttgctctccatattctagaatctttgtgctctggctcagttccctttgagttccatgttttccttcttcccttctatacttagctggattgcagagttaagtttatggttatgaaattaaaactaaataacaaaaaaagattataatggtgctaaaaaattcctatcacctagtgacgccctagcaatgcaactcatgaccttttccatatttagatacacaaatacttgccattgtgttacaattgcctacagtattctatacaataacatgcaataaaggtttgtagcctgggagcactaggctaagccatagagaccaggagtgtggtatggtgtaccatctaggtttgtgtaaatgcactctatggtgtttgcacaatgacaaaattgcctggggatatgcatttcttagaacgtatccccatcattacacgaggcacggctgtattttgttgcaattataaatgctatttcttatgtcccttctctctgaatctgggcttgactgacagatttcaatggaagtgtttgctgtaatgctttccaggcccaaagctactttcccttctcctgggatgctcacttctgaaacccagcagccatggtataaggaagcccaagccgccccgtggagagaaccaggtggggagaaagcagtcaagccagtcaccactgcagaggggaacccccaggccctgtcagccacccccagctgccgccacctacactatggggaggggagcgagatcagctggctctgcccagccctgcccaaattgcaaattcatgagcaaaacaaaggattgttgttttgaagccattcagttgcagagtggtttattatgtagcaatggacaactagagtgccaccttttaccctcgtggggtagcatagacccaattatgagccccattttatagacgaagaaactaaggttcagagaggtaaaatgacgggctcaaggtcagacgggtaacgagtggcaaggcaagattaaatgacgtcaacttctgtgttttttccacactacccctttactgtcagcgcaacagcatggcgacccggaggtttccattaatgccattctcactcaaaagcaggaaactccaaagggggattcttgggcatggcgaggtggcttggggagacagtggctgagcaggggagcttacagcagtcttagagtcctcccgagtgtaccaggtagatgggagtctgctcgttgttttgtaaggagaggccacggagaccttttgagatgagcaaacacaggctcgtttgtgtgttgaaggcctctgtttccccttttgtgaaagggggatgggaaaaccacccttgtcctgatctagccggtgctggagatgagcgggccccttgtcagctgctagcattccattttgaaagaagtgagtaatagcggagactcccacaatgagaatttttaatgcaagaaagtccgtggtaggcaagagggagagggcaaagcccgttcctgaaagctttgtaagcaaagcccctgccaaactgtgttgcttctgaggccagaagcagcatgaaagatccaaccggggagggaggcaggggctctgattctggtcccagctctgatcttgacctactgtgtgaccttgggcaagtcaccgtccctctttggtccttatatgtacaatgagaggatgggctggctgatctggaagatcctgacagtgtccaacaggcaggatggacaaacccgaagaaactgagaagcttctctaccctgcagccccaagagcttgcagaatttagcagtcagtgaggaatcaatcagtcccttaggctgttctagaggcagtgatgtaggtgagctcctccaggcaaattcttctccccctcctctccctcattccccattgtcatcattattatttatttgcctttcaaatgggccacccggagctctttataaagataaaaatagcataattcaaagcctccaccagcaacccaatcccatctggtgatggagggttgcaaacaatcgctttgttcctcccaactctgactccttcagggtcttataaaatgagagcacgcactttcaacatctaattgaagataatgaggatgatgcccatgctgagggtggtggctgtcatgtgccagcacgggctttgtgtcaacagggtgtatagcatggtctcatgtgatcttctcaataaccctacaatgtagtcaactatcattacttttttcttttctttttttctttggagacagggtcttgctctgtcactcaggctggagtgcagtggcatgatcatggctcactgcagcctcatcctcccaggctcaagtgatcctcccgaggagctgaaactgcaggcatgcaccatcacagctgggtaactctttagttttttgtggagagggggtctctgtttcttgtccaggctggtcccaaactcctgaactcagaggatccacccacttcagctcccaaagtgctgagattacaggcatgagctgccacatccgcatcccgttactacttttacacagatgaagaaattgaggcctacagagggaaagtaacttgtccaggattgcagaattagcgactgggattcagacccaagcatcctgactccagagcctcgattctgaattattaggctattttgcttcccagcagcatcagcaacaacaactactactattactattacccactactacttcactgagcacttattgtgtgctaggcatggagctcagggttttaattctgttctagcaaatccatgctgcagaacaaatcaatccaaagttgattagaacaataagttatacttttgtgttcatgcatcggtaatttggacagggctcagtggagactactcatctctgcctcagctgggatgattccaaatgcctggaagagctggggcctggctgggtacctccctctctctcttcctgcaggtcagggcctccacgtggcctcgccagcatggagttcccagggtcatcagtttcttttgttttttcttttttttttgagacagagtttcactcttgttgcccaggctggagtgcaatggcatgatcttggctcaccgcaacctctgcctcccaggctcaagtgcctcagcctcccgagtagctgggattacaggtgtgcaccaccatgcctagctaattttgcatttttagtagagatggggtttctccatgttggtcaggctggtttcaaactcccgacctcaggtgatccgcccgcctcagcccccaaagtgctgggattacaggtgtgagggtttatccgtttcttacatggtggctggcgtctcctagagactaacacagaagcagcaaggtccttctgccctggccttggagggcagcagcgtcactcctgctgcattctgttggctacagacgaacataacgtgggtccagatcccaggggcacgggaagtgaatccccccatctcagtaagaagcttgtcaaagcactgatggccaccttcaactcgccatgcttatgttctcatttaagaacttttacaatgatctatgggattcatttatccactcacatccattgagcacctaccgtgtgcccgacactgctgcaggtcctgggagagagcaatgaatgtgaatgtcattacactcactttacagatgaggcaatggagacttgcaggggtctcagggaccagccctttccctgtagaccctcacgagttctttacagtgagcccatgaggctggtactgcgacggccagccttgaagtggagaagcgggatccgcatgctggccaggcacttgctcagcaccccttccttgccttagtgagttccaagtctgcacttcactgtgacagggatgcatgggtcccactggacttggggggcatcctgcaggaggggccaggcttatggagaagaagcccgcggtgctgttcaaatgccagccctgatgcgagcgagggagggagggttgcctgagggcgggaagcggtgagggagccgggataatggcccagcctgaacctgtcgccacggcaaccgcaggggccgtctggagccagcagcctgccaggccttggccccacaaagcccgagagggaggcagagggggcggacctggcggggcataaatcagggagttctatgcccctgactccgggcagacgatttatgggactactccaagcccacgagatgcacaggggagagctgagagggtctccctgttcccaccgcccctggggcccctgcttggactcggatgcgtgtgcagggtgggcaggaagaggcccctccaggccaccctcagagctgctggaggcccctgcccccacccatcccataagacacctctgtgcccactgtaccagcatgcggcccccacgccaacagcaaaagtctcaagaaagagatacctctaaattcttgaaatgcatgctgatattttctatcttattctgttctattcctttttaaaaatgctggtcacaactcactaaattaatgtcatgactcattcatagtttgtgacctgcagttaggtcaacactgatccaaaggaagccagagggggaaactgaggctcaccgactccctcctctcacacacaactggagcagacttatatgcatcaatcagctcctccagtctccccacacacctggctctgcctcagggcccaagcttgttccccaccacccattgtagtcattcaagatggaaccagcttccttggaaggtaatgagctacccatctctgaagtcatccaaacaaaagttgaatgaccacctgccgggtgctccagggaatcccggcatcccttagagagaggccagactaatgcctctgagcctatacggggtgggaagcaggcaacgctgactactttgcccacatagcggctgagccatggacaggatgggagagaggctgcaggccagccaggcccactggagggggctcagagcttcaggctggctcagatagacaaggggcaaagatagcatcaagaaggtgagtgtccaaggatggtggctcacacctgcagtctacctcagtactttgggaggccgaggccagaggatcgtttgagcccaggagttcaaggctgcagtgagctatgattgcaccactgcactccagcctgggtgacagatgagaccctgtctcaaaaaaagaaggtgagtatgcctggtgggagcctggcagagacaacaggggccacttaagaggtcccagcacccagcccccttcctcctggcccctttgcattacccgcccagacctgcagggggctgtgccttccctggctgggcccctagtcctggaacaatgttcccagccccacaatcactgtttctgccctatctcctgcctctctcagctgtctacctccagaaacaagttcctcttaccaggaggtgccgagatgctaagaacggctgatgactgtgtttccgcacagcacagaggcctgctgctccagattcagacagacccggatcccaggcccagctctgccactcacctgtgtgtgatcttgagcaaaagccttgacctctcccagccattttagtcaataacatgaggccatcatatctaccttgtgatcattgataagggaagacatccagggtatattaagttaaaagggcaaatctgttcccatgtttgttaaaaacaaaaacaaaagcaaacccctttatttatatgttcgctatgcatgcaaaagcttggaaggaaatgccccaaacaggtggtagaagggtcatggagagggagaggtggatgattttcatttcctactctatacactctttgaatttttttttttttttttttgagacggagtcttgctccgtcattcaggctggtgtgcagtggcgtgatctcggcatcttggctcacgcaacctctgcctcccgagttcaagcaattcttctgcctcagcctcccgagtagctggg

SEQ ID NO: 93996 - DNA, 12912 bp, Homo sapiens
caaataatattctttcagtatcactcagtggtaacttaagtaaatactgattaacagtcactcagtagactggttatagtggttgaatctttgatttacagccttctcttgtaaattttaagtttttcacagtttaaatcaacatcagaaggtttttaggtgtcagactgcagtctcttagctgtaggtcctacatggtttatttgcttttccttttaaaaggatctgctaagtccttcctctcttttaacttttttttttttctttgtcagagatggggtcttgctatgttgaacaggctggtcttgaactcctggcctcaagtgatccttccatcttggcctcccaaagtgctgggttacaggcctgagccaccacacccagtcccctcttttaacttttcattgtaaaaaatttcgaatgtatacaaaaggagagaaaagacaatgaactctcaggtctttattattcaactttaacaattagtttcatagctaatcttatttatctgtaagtcttcattggttattttgaagggaatcccagacatcatatcacatttacagtttgtttgaatcagtgtccttatggctactggtggatatctctcaaactgtagatccctttaaaaaattttttcttgaagttttttatttgttgaagaaattggatcctttgtcctatggagtttcccacagtctggatttgctgattttatcttcatggtgctatgtagcatattcctcttcccctttattactataaattggtagttaaatagagatatgtttcaatatttcagcaagaatactttgtaggtggtgttgcgtacttacattgggaggctgagtcccttttactctaatggaacatatttccttgactatactgaactagacatacgttgctctagggagagatgtttttcttttgagggcgtctgaggcaaaagtcattctaggtcccattcttttttttcttttttatactgcctccactacagcattccacctttgaacttcaggttagggattgttgggaagaggctattacccacctgttgtatgctcctaaattatttagttaagaatgtagaaaccaagtgactattctgaatagcagcaaatacagtatatctaaaaaagtttttcccatctctttaggtttcctgtggtacatatagccaccgtccctacgagaaaggttcagctagcattgctgtatcaagttctgaatatatcattgcctttttgtacctaggctttcttgaacattctgcaaagacttaataaatgatatttataacatcacaattttctggattttgaactaattcagcactagcaagaccatattctcatcctgggggagagaaagcagagtcagtgcccagatgcacttaagtggtatatttacctctagcattccagaatcctggaaagcccatcttcctgcagtccaccccttgaatctgttttaataccctttgacttctgtggttcaaatatatagtttgtatcaaagaccatgatccaaatactttttttccacactcctatccctactttgcttccctttctctcccttctctttcttccatccttccttttattggtcacatgtttataattgcctaacgtgtaccaggcaaagtgctagacttaggaagcaggttaacaagacataggccttgtgtgcaagggaagggatggcccactgggacatttcattatctatatgaaaaaaaaactatcacatcacacatggaatccagaaaaactcagcccccaaatgtgaaaagcaaaagtttagaagaaaataaaataactttgggagctcacggtaaggaagatttttaaaaacatgtcaaaagcacttttcataaagaaaaatatttgactatattaaaataaaaattttccttggacaatgaacactgtttaaaaaaagcaacatgccgctgatggcgatgtaactcaagtagttgacaaaagattagtatctaaagtataaaaagagcttctattagtaaataaaataataaaaaccaccatgcagaaaaaggggtaaaggatatgagtaggcaattcacagaagaaaacttagtgatcagcaaatacattaaggtgttcaacatcactgattaaaaaaaatgcattttaaaacaaaatatttcatacccatccgattggcagaagtctgtcattaccaattttggagaggatagagagaaatcagtcttatacacagctgatggagtatagattggccaaaattaccttgaaaggcaatttggcaataattagaaagttgaagatcaacatactgtagtgtgtgtgcgaatatttgtgtatgtgtccaagaaaaagtcctgcaatatgaataacaagatctccataccaaacatttgttgcaatgttgtatgttacagtacagagctggaaataccgttaagagcccattattaaagaataaataaagcaatggaataccgtgcatattagtttgctagggcaaccataacaaagtaccacagacttgatggcttaatagaaatttattttattttattttatttttaccagttctggtggcttgaggtcgaagatcaaggtgccagcagggttgattccttccgagtgctgtatccgttccatcagatacagcacttgggggttagggcttcaacatacaaatttggggaggggtctggacacacaattgaatccacacttctatgtaacagttaaaatgggtaaactagaatgtatcaaaatagataaacttctaatgcctattaagtaaattttttttaaaaaaagagtgatacatgccgcagaacttcatgcctgtgaagtaaacaaaactattgtattgtttatggagatagtcagcatttgtagtaaatgtatatacattcatgggaataataacaacttctggatagcggtcaccactgagaaaggaatggtggaatgagataggaaaagatcccatggggactttatctgtaaagttttcttccttaaagaaaaaaggaaaaagttgaagtttgttcaaactggctagcaggtacatgggtgttatattattctttataactttcctatatatttggaacctgataatattttttaaaaagcaaagaaaatatatgaatgaaataatgttattaatagaagttgaaaattcatttgtgtaatatgatctagtaatcaaatatcaggcacaagttaccttatgataaagttcattcttctggctgaaattagattttatgtttagaacaacaataaaatcaataaatctttatagcatcctatgtcaaaagcaagatgtttactttccatacataaaaacgtgtgagcttttgaaatgactcatttgtagagcattgagttgcgtatattagggaacttcttataatgtaacacaatacatagcatatgtcattttgttctagagcagtggctctcaactagaaacaagtggaaataatgtggggcaattttagctgtcagaatgtctaggaagcactgctggcatttagtgaacaccactgtatgattccaaacatcttataatgcatttgataaacccataaagtaaagcagggtgccatcctaaatgtcagtacctggttgagaaacacgggtctttggttaatttcctttcatgaaaagtagagtctctaaaattcataagagcaggcaagtactaagaacaatgactatttcaaaggcaacttggattacagagagaaacagaattgatagtttgcaatctgttgattaggcactagtagtatctaaaggaagttttttcttaattttatgatcctaattattttttattaagtaaaattaataacataaaaattaaccacataaagtgtatgattcagtagcatttagtaactttacagtgttatgtagccatcacctctatctagttcaagaacatttttcatcatccaaaaggaatatgcattaagcagtcactcttcatttccgcaaccccaaccaaccactcatctgctttctatctctctggatatagctattctggagattttgtatacagggagtcatacaatatgtgaccttttatgtctgccttctttcacttagcataaagttttcaaggtttatccatattgtagcatttgttgatactgcattcctttttatggttgaataatatttcattttaataatatatcacattttgtttatccattcatccacttatggtcatttgggttgtttcctccatttgactcttgtgaacagtgctgctatgaacatcagcccatttgtgtagaggtttttgtttgcattcctatttttatttctttgggtggaattgttaggtcaagtggtaattctctgttttagctttttgaagatatgtcaagtttttcaagagcagccatatcatctttcattcccacaagcaatgtgcaaggattccaatttctccccatccttaccaacagaatccattatttttaagaagacaaagtaagtgaatttaaatgtcttcatggtgtgattccgaatgttttttatttcctttttttctggctacacctttttagcattagccactattatgactattattatttttttaaatataaaaaattttgttttatagcatatgagcaaacaaaagtaaaagtaaatagttttcatttaatataagcaagtataaggtaaaaataagttttgctatgatggactgcgagccaagtcacaacctacaaaagggatctgaagtcaatgtgtttttaacagaattaattattttataggggtagaagctaagagtttgatttgtcctggtaaggatagaatgtaagagcttcttctcgttgatctattatagtatacctcctctatttcagattgtctttgggttaaatctagtatctggtattcacagatacctctgtttctataacacaagaaatttgaatcaagtatataggagttgtgagtcactctgacttcagacttgaggactccaaataaatgtaaaaatagcattgaacttttggatagaggctaaacttggtgttggaagggacaagtgagagtctcctagaatattttctgcagtaaaaaatagtttatcaatgatttgttgaaactggggaaagtttctgaaatgtttctagcaaacaagatatctaaatgttctttctgtgatactattgcttacattgtattatatattatatatgtttggcccatgactgctaatttatttattgtatcatctttaaatttgaataaagggaaatgttacatggtatttttgtgacatttctttgtgagaaagtaggattagactaagtttttttaatttttaaacacatgcttcctaaaatttattatttcttttgtgtagcccccctggataagaaagctttatctagcttcaccctatagtttgatttagagaaaacacaatatgctttctcaagccatctctgttgcttaaatttttatctgctttattgctgatgttttccccctcttccctactactttatatcaataacattctggtaatatgacttgagatgtaaatcttgaaagatttagaagatgagtagttagcatgttccataaatgtaatagttatgataccacagcacaattatggtactgaaattttgttttttaaaatctaataccaaaataccagactgatactatttaattaaaatttttgtaaaagttaaaaatcagcaaaacaggaagttcaatgcctgtcattatcaattatcaacaatcatcaatttaaaaaattagaaaaatattaatgttgagcatacattgtcatttgaacaaaacttatttgcagataaaattagtagtatcattttattcaaaaatagaaaatggcctcagaggctgcccgtctgctggtcccaacaccacacgcgcctttcctgcctgggtcttgttgcagtcgccgccgccactgcaccatggctttcatcaccaggcagttcatgcactctttgtcttccttgtccacaaccttgggcaagaaaaatcatcatcaagcacatgatggtcatcagcatcacacaggttgctgcagtgaccggccacacagtagtgttgctagaccagacagaggacatcttggcaaaatataaagagggaattgagaaaagccttaggaaagtgacaaagaagttgtttgtagaaaaccctaaggcttttgatgaatttgtggagaaaaccctaagcagcatatcaaccagcacagatgcaatatccgtagtccacagcacagacctagtggtagaggccattgtagaaaatctaaaggtgaaaatcaagctctccaagaggttggacaagtttgttgctgaacatacaastttgccagcagcacttcctctttgcaaattacaagcatagccaatgctaccaccaaacaagaccgatttgctggcctccatttactcaacccagtgcccctgatgaaatttgtagaggtctttaaaacaccartgaccacccgaaagacatttgaatctttggtaaacttgagcaaaaccctgggaaagcatcctgttccttgcaaggacactcctgggtttattgtcagctgtctcaggattcaacacctcatggaagcagtcaggctgcatgaatgaggtgatgtatccaaggagaacactgacactgctatgtagttaggagccaggtaccccatgggctcacttgagcttctagattacgttgggctggattctgtgcagttcatcatggatggatggcatgaaatagatacaaagaaccccatatttcagcccagcccatccttgaaaaagctgatggcagagaagaagcttggcaagaagtctggagaaggattttacaaatacatgtgatgctcagcttctctggcactgagaagaatccctgtgagcgcttaccagccagcacccaaagtgcctgtgagaatactctttggtcagacattccctcacacagcacagtctatttgataagcattttgattgtaatctatccgaagttattattacgctagatacagtagtaacagattccaccattaagaactaattcccatgtttagtctgtttatttctgtgtattttctaaaaagcgttatactgttggtgctttggaacaaatgctgtcatttttgtaaagaattgcctgaattcattctctcataaggggaagatacttgctctgagagtgagagtgagagtatattgtgttcattgttgctgtgtggcagtcacaagccattgggacagacagggtgtgtctgtggagtgcttcagcaagcagcacctgaatcttgcctttatgagaacattttgccccttgcagccttgagccttaccctaccttctgggcacaacataagatgttatatctccattcagctgatcatcaagacactgctgctgcatgggtgggctttccatgtgcttggtttgcagtaagaggtcggttttcctggtcattcagttccacagatcgtaataattactatctgtctggtttttttttcccacaagaaatcagtgttgcaaaattgcctataaatggactaataaaatacagtcttttagtctgtcaaaatttgaattgaaataaacatgtataaaataaaaatgtttaagaaaccccaaaataataaatgaacatttaaattatgaaatatttaaaagtcaaatgttatctgcttttataaagtgcaggctcagatgtgcattggtggtttattattgagtgatacgtgtatttttgtgcatatctttccagctgctgaaaatgctttcttaactagttggagtaatggtaaaaagatagataattgcaaatatattcttctaactcctttgtctataggtaattccatttcttttttgataactttgaggttttgttatttgaaattttatttacttgaattttcatatatttaattttttaatcaaagctttaggaacttataatttattgactcaaaaagatattacaaaacatgctaacaaaaaccacagttacccaaaccactaactcattgcctgtcagagagaaccaggtgctttctcttcttttacatccctacctctgtccagtgacaaaaattggccagagaggaagggagccctactgatggtgaaaagtccagcttcctgggttatcacagagggtagagagtgatttcaaagagcaaacagaaaatagccagcctaaatagatttaatttctaagatgtctctttttaactttctgaatatactttaaaaatatatgtatatagtatccaatttgtgtttcttgaatgccgtgtcttcccttaacctttgtgaggattaaaattttgttttctttttgcacagtgttatttcttccaagtaagggtttcacccccttttttcctgtctttcatattagagagttttttccagttgtctgtccatctgagtatgtttaagagtggggcacaaaaagttgataggaagctcttcatgtgtagatggtgcttctgctgtctgattcagtaggtctgtagtgggacccataaatttgcattttaactagttcccaggaatactgataccgttagtccaggaatcatatttttttaagaactgctttattagggaatgcttttgtgattcatatctatggaagggaatggatgggaaggaaacagcttgggcagaggtgaagttgaactgcaatgctgaagagttctgaagatagaatgaccaatcaaagctgtcccaggttgggggaaggggctgggccttaatatccccatgttgattagtgtctagatatgggctgtccctggaaattggtatgaccttgagaagtgatatttccttcagcctaagcaatcatacccaagggtacagacactgaatgctgacagacacccatggctttgtgctgcactgcactgcactcccagcagtggacaaaattctttcctgaaaaggggaaatggagcattgcattatgttgtctgtacatgatccttcccagtgagcagggaagcctcatcctgagacagatactttttctaatttttcctttaccatggattaattttatctactctagaacttcatataagtaaaatcatatagaatgaacttttctaggtgttttatatggctcagtataatatttattagattcatccatgttcctctgtgtatgtatgggttacttttaattgctgagtagtattccattgtgtgactatgccacaaagcgtttatttattcttacattgacatcatttggattgattccagtttggaattataaagatgctatgaacattctttttcttcaacatctgttttgtggacatctagtttgattcctgttggataaatacttatggtaggtttatgtctaaatgctaaactagtccaaggtggttttgcctttcacattcccaccataaatgtatgaaagctatggttgcttcaaagccttgccaatatttgggtttttggaattttaaatttaagcctcctactggtgtattgttgcgattttgatttgtatttccttggtggcttggttccttgaacatcttttcatgtgtttattggacatttgtgtaccttttttgtgaaatatctattccagttgtttgctctttattaattgagttacctgtctttactatggagttgtaggagttccttatgtattctgggcataagtcttttgtcagatatgtttttcgagtattttatgtagttgttttttttttactgtcttaattgatgtctttcagtgaatagaagtttattcttatttcgatggggtctgatttatttttatttttagaaacagggtcttgttctgttgtcctgggtgaattgcagtaacatgatcagagctcactgaagccttgaactcctgggctcaagcaattctcagcctccaagtagctaagggctacaggcatgcaccaccacgcctggctttttaaaaaaaaatttgtagaaatagagtctcactgtgttgcccaggctggtctcaaactcctggcctcaagcaatttttccgccttggcttcccaaagcctttttaaaaatgtttattgcagtggggcgcagtgcctcacgcttgtaatcccagcattttgggaggccgagatgggcggatcacctgaggtcaggagttcaagaccagcatggccaacatgggaaaaccccatctctactaaaaatacaaaaatcagctgggcatggtggcgtagctactggggaggctgaggcaggagaatcacttgaaccccggaggtggaggttgcagtgagccgagatcgcaccactgcattccagcctgggtgacaaagtgagactctgtctcaaaaagaaaaagaaaaaaaaatgtttattgcttctgtaaccctaagaaatctttgtcagctctcacatcatattctcctatggtttcttctagacactttaagcttcagctcaaatttttctatagtatgaggtttgtacatttgtttacagatgtgtctagttactccaccaggatttgtaataaggattttcttttgtccctcgaattgctttggtacctctgctgcaaatcagtttactatgtagaagtcaggtatcattagtcaggtttcattcatacaactttttcactgcatgcaatgttacttttttctggctgctttcacagtgtgctttttatctttgttttttgatccttttgacaatgtgtgggtttctttataattatcctgcttggaatttgctgaacttcttggatctagaagtttgtgtttttcataggatttgggaagactttggccatttattaaacattatatttttctgtctcattatctctcctctcccattgtacatagttagaccacttgatattgcactttaaatttctgaagctctgtttattatttttaaaaaatcttttcttcacattcaatagacctattgattttccagttaagtgaccctttttctgccatctgatctcaaattaaggtcatccaatgaatttttcatttcagacattataacttttaagttctagaacttccatttggtttttttcataacttccatttttcagctgagatttccccatgcgaacatttattatgaccatattttcctttaaatacttgaacatgtttataatacttgctttgaagtccttgtctgctaattctgacactttggatcattcaggatttagtgtctgtgagctgctttttctcttgactctaggtctttttttcctgtttgttcactatagtgtattttgcttgtgtaatgggcattatcagtgatatgttatagactttggattctgttctttttctctgatgagtgttgactttttgttttagtagacatctaatgtggctggattcaaaccccaactttattttttctgtgacaggcagcagcagaaatctcatctcaaatccttccaccttccagctgtttctttttgtgaagaaccttggagtcttcctcaaactagggtcattcaaatactgggcgtagttcatatagaaattttggagcactttcctttctgggatttcacctttcacttttaagctgccttggcaaccccaaactttgtcctttttaagctagcaagacaacagattcctgcttcagtctaagtgaccattgccacatgggctgataagtaccctcaggcaaaagccttataaaaattctactagtgcactttgggaggccgaggcaggtggattgcttgagctcaggagttctagaccagcctgggcaacacagtgaaaccccatctctacttaaatacaaaaaattagccaggtgtggcaacatgcgcctgtaatcccagctactcaggaggccgaggcaggagaatcacttgaacccaggaggcggaggttgcagtgagctgagatcgtgcctctgccctccagcctgggtgacagagcaagactccatctaaaaaaaaaaaaaaaaaattctaccagtacagttttctcatttaaggctaacttccttccagttgcttcctgcttttgattactcttttgatttaatgtttgtttttatattttgtccagaatgtataattgttatgtgtagcaagtttattttaatatatgttaacttgtcgttatctgaagcagaacactgaagcattattttaattgaaacactcaaagtatattcaggtgttagttcaggaaactgaaacatccactaaatggaatattacaaaaaatacattacattaaaaatttgaagactcttagtagaacatgattttggtaaatttaaataataccctgctttgattatagctgtgttaaaaattagatatgttcatgaatacatacaggagagaatatgggaaagaaggaaagagtttattggttgtagtggtggaatttgggggaagttttcaaaaatattccattaacactggtataaaactatggtgtgtttattatacacacatatatgtatagatatgtgtgtttattatacacacatgtatagatatgtgtgtatattatacatatatacacatacacacatgtatacagttcataggtatacatatagtatatgtatacacccatataataaaagactcctagacagtatagttgagctcttgtggcaggattttcaccccacactccggacataaacttttgataagatatatacagaaaggttatatacgtatataaaagcttcaaatcaagaaagagaaattaaattcataggtgctagtaacaaggaatcaggggagcttacttaagaaaggtcgtaagcaggaactaatttctaaatgacccatagtggttttc

SEQ ID NO: 93997 - DNA, 12698 bp, Homo sapiens
aaatgttaagggcagccagagagaaaggtcgggttaccctcaaagggaagcccatcagactaacagcggatctctcggcagaaaccctacaagccagaagagactgggagccaatattcaacattcttaaaggaaagaattttcaacccagaatttcatatccagccaaactaagcttcataagtgaaggagaaataaaatactttagagacaagcaaatgctgagagattttgtcaccaccaggcctgccgtaaaagagctcctgaaggaagcgctaaacatggaaaggaacaaccggtaccagccgctgcaaaatcatagcaaaatgtaaagaccatcaagactaggaagaaactgcatcaactaatgagcaaaataaccagctaacatcataatgacaggatcaaattcacacataataatattaactttaaatgtaaatggactaaatgctccaattaaaagacacagactggcaaattggataaagagtcaagacccatcagtgtgctatattcaggaaacccatctcacgtgcagagacacacataggctcaaaataaaaggatggaggaagatctaccwagccaatggaaaacaaaaaaaggcaggggttgcaatcctagtccccaataaaacagactttaaaccaacaaagatcaaaagagacaaagaaggccattacataatggtaaagggatcaattcaacaagaagagctaactatcctaaatatatatgcacccaatacaggagcacccagattcataaagcaagtcctgagtgacctacaaagagactcagactcccacacattaataatgggagactttaacaccccactgtcaacattagacagatcaacgagactgaaagtcaataaggatacctaggaattgaactcagctctgcaccaagcggacctaatagacatctacagaactctccaccccaaatcaacagaatatacatttttttcagcaccacaccacaccacaccaattccaaaattgaccacatacttggaagtaaagctctcctcagtaaatgtaaaagaacagaaattataacaaactatctctcagaccacagtgcaatcaaactagaactcatgattaagaatctcactcaaaaccgctcaactacatggaaactgaacaacctgctcctgaatgactactgggtacataacgaaatgaaggcagaaataaagatgttctttgaaaccaatgagaacaaagacacaacataccagaatctctgggatgccttcaaagcagtgtgtagagggaaatttatagcactaaatgcccacaagagaaagcaggaaagatccaaaattgacaccctagcatcacaattaaaagaactagaaaaccaagagcaaacacattcaaaagctagcagaaggcaagaagtaactaaaatcagagcagaactgaaggaaatagagacacaaaaaacccttcaaaaaattaatgaagccaggaactggttttttgaaaggatcaacaaaattgatagactgctagcaagactaatgaagaaaaaaagagagaagaatcaaatagatgcaagaaaaaatgataaaggggatatcactaccgatcccacagaaatacaaactaccatcagagaatactacaaaaacttctatgcaaataaactagaaaatctagaagaaatggataaattccttgacaaatacactttcccaagactaaaccaggaagaagttgaatctctgaatagaccaaaaacaggatctgaaattgtggcaatagtcaatagcttaccaaccaaaaagagtccaggaccagatggattcacagccgaattctaccagaggtacaaggaggaactggtaccattccttctgaaactattccaagcaatagaaaaagagggaatcctccctaactcattttatgaggccagcatcattctgataccaaagccgggcagagacacaaccaaaaaagagaattttagaccaatatccttgatgaacattgatgcaaaaatcctcaataaaatactggcaaaccaaatccagcagcacatcaaaaagcttatccaccatgatcaagtgggcttcatccctgggatgcaaggctggttcaatatatgcaagtcaataaatgtaatccagcatataaacagaaccaaagacaaaaaccacatgattatctcaatagatgcagaaaaggcctttgacaaaattcaacaacccttcatgctaaaaactctcaataaattaggtattgatgggatgtatttcaaaataataagagctatttatgacaaacccacagccaatatcatactgaatggtcaaaaactggaatcattgcctttgaaaactggcacaagacagggatgccctctctcaccactcctattcaacatagtgttggaagttctggccatggcaattaggcaggagaaggaaataaagggtattcaactaggaaaagaggaagtcaaattgtccctgtttgcagacgacatgattgtatatctagaaaaccccattgtctcagaccaaaatctccttaagctgataagcaacttcagcaaagtctcaggatacaaaatcaatgtacaaaaatcacaagcattcttatacactaacaacagacaaacagagagccaaatcatgggtaaactcccattcacaattgcttcaaagagaataaaatacctaggaatccaacttacaagggatgtgaaggacctcttcaaggagaactgcaaaccactgctcaaggaaataaaagaggatacaaccaaatggaagaacattccatgctcatgggtaggaagaatcaatattatgaaaatggccatactgcccaaggtaatttacagattcaatgccatccccatcaagctaccaatgactttcttcacagaattggaaaaactactttaaagttcatatggaaccaaaaaagagccagcatcgctaagtcaatactaagccgaaagaacaaagctggaggcatcacactacctgacttcaaactatactacaaggctacagtaacaaaaacagcatggtactggtaccaaaacagaaatatagatcaatggaacagaacagagccctcagaaataatgccgcatatctacaactatctgatctttgaaaaacctgagaaaaacaagcaatggggaaaggattccctatttaataaatggtgttgggaaaacaggctagccatatgtagaaagctgaaactggatcccttccttacaccttatacaaaaatcaattcaagatggattaaagacttaaacattagacctaaacccataaaaaccctagaagaaaacctaggcaatacccttcaggacataagcatgggcaaggacttcatgtctaaaacaccaaaagcaatggcaacgaaagccaaaattgacaaatgggatctaattaaactaaagagcttctgcacagcaaaagaaactaccagcagagtgaacaggcaacctacaaaatgggagaaaattttcacaacctgctcatctgacaaagggctaatatccataatctacaatgaactcaaacaaatatacaagaaaaaaacaaasaaccccatcaaaaagtgggcgaaggacatgaacagacacttctcaaaagaagacatttatgcagccaaaaaacacatgaaaaatgctcatcatcactggccatcagagaaatgcaaatcaaaaccacaacgagataccatctcacaccaattagaatggcaatcattaaaaagtcaggaaacaacaggtgctggagaggatgtggagaaataggaacagttttacactgttggtgggactgtaaactagttcaaccattgtggaagtcagtgtggcgattcctcagggatctagaactagaaatacaaattgacccagccatcccattactgggtatatacccaaaggactgtaaatcatgctgctataaagacacatgcacatgtatgtttattgtggcattattcacaatagcaaagacttggaaccaacccaaatgtccaacaatgatagactggattaagaaaatgtggcacatatacaccatggaatactaagcagccacagaaaatgatgagttcatgtcctttgtagggacatgtatgaaattggaaatcatcattctcagtaaactatcgcaagaacaaaaaaccaaacacagaatattctcactcataggtgggaattgaacaatgagaacacatggacacgggaaggggaacatcacactctggggactgttgtggggtggggggagggggaagggatagcattgggagatatacctaatggtagatgacgagttagtgggtgcagcgcaccagcatggcacaggtatacatatgtaactaacctgcacaatgtgcacatgtaccctaacacttaaagtgtaataataataataaaaaaattgttattatttcaggtgtggaaaacttttcaaacttttcaaaaacttatcaggaaaagaccagaaaataatattttacaaaacaaaaggtctcataaagctatcaaacaattgtctatagtatacaagatctttctactaatatcaaaaatcaattgattcgaatattgaaataatataagtatttttctttagcctaaaatgaaacatgaaataaaaagcactcttcaattaatacatcggttatgttttatttcaatttttgcaaagaaatgctgtcaatttgtggcttattcaacttttgtcatatattatgtcattcacatatgtcaaagaagataatctgctagatataaagatgttattttctatcacaacggttggtcctcagctccaactagacaaaattttctattaattagaattctaaaacagactgcattcctcttcacattttgttctgctattagaaacacactgaaaatatccatacattttctgatcaaacttaatgaaaagtttcatggatgttcagttgttaaaaccatttaatatgtgtatgcaagtgtataaatcatcaacaggttatgcaaattttgaaagaaaaagaaggcagtcaattaacatttttggggttctttttgagacagagtctcactctgtcacccaggctggagtgcagtggggcaatctcagttttctgcaatctctgcctcccagtttaagcgattatcttgcctcagccaccctagtagttaggattacaggcatgtgccaccatgcccggctaatttttgtatttttggtagagatggggtttcaccatattggccaggctggcctcgaactcctggcctcaagtgatccacccttctcagcctctcagagtgctgggattacaggcctgagccatcgtgcccagccaattaacttaatgatactgtgttctctaccaatgattgttgtttgaatggcaaaaagtttcacacagattttctgtactgtaatttccaattaaatatttccttgaaacaagagaaatgcatgccaatattcgatagttaagaccccccgaaattcaagtgatttatgctttctcaccaatatcacaatatatgttaactaatatgaagctaaatttagtagaaattgaaatttttcacaatacaaatctatgataataacatattcctctaacaggataaatatgtagaaggtgtttattgtaattgacagtgtcatgtaaattggctgcaaaactactttttttctaagaaaactttgaggaatgctttgctgatattaataaacagttgattttaatttatcaaatgcctatttaaatttaatgttaatgctactgagttgacacagtcagtagattgatttaacttaggaagcggtatttttggaactgttacacatttgcctctaagttaaatttcctccttccaggcataggctatggctgtggcttccctcatgtctgcgttggctgcccaactgctctgtcccccgcagagctgccgcccgcgctctcgcaccttccacagcacggcattttggaatcaccagtgagacaattgtgaaaccagcttcaatttctgaggaagaattgttgaagttaataaataaactgagtaatgttgataattagataattagatggccaccttgttcagctgcctcttccagagcacactgatgagagaaagatctgcaatgctttttctccagacaaggatgttgatggctttcctgtaatgaatgtaggacgaaagtgtttggaccaatattccatgttaccggctaccccatggggtgtgtgggaaataattaagcgaactgacattccaaccctagggaagaatgtggttgtgactggaaggtcaaaaattgttggaatgcccattgtaatgtcactgcacatacgtggggtgcatgaacgtcccagagatgatgccrccgttagaatatctcatggatatactcccaaagagcagttgaagaaacaaaatatttgcagatattgtaacatccgctgcacgaattctaaacctgttcacaatagatataatcaaggaaagaacagcagttgttgatgtgggaataactagagttcaagatcccgtaactgctcaacccaaattggttggagacgtgggttttgaaggagtcagataaaaagccggttacatcatgccacttcctggaggtgttggcctcatgacggtggcgatgctaatgaagaataccattactgttgcaaaaaagttctgaggcttgaagaacagtaagtgctgacgtctaaagagcttggagtagccactaatgaactattgtgtcttctatgtcacaaacagcactccaagccagctcaagaagcaaagcaggccaatagaaagacaatattttttatttattctactgaagtggtttaaaatgatgctttgtatttattgaaagcttaaattggagggtgtttgtgcacaatagctctgcagtacctcaccagggagcattccactatgcagggtcgtgtatctagctaacagcagccattaacccagtgatgaacctgggagacatttgtcatattgagatggatatttaactctgtcaaaccacctcggttgaatatttgccttcattaggactgcgtttcccaaatgctatttcaataagagttgatactcattttaggcaccaaaacttttgggttcaactgatcaaaccaaaggaaaagtgttgctagacaaaattagggaaaaggtgaaagaggaaaatatggtagtaatcgagtagaaaaaaattcctctaatttatatatgcattgattagtaaccagatttatctaagtaggactgaattggctaggataaaaagaaaaaatacgtattaatccttttcctaagctgtctttttgaggcttagtcagtcattgggaaaatgtttaagattgttccttgatatttgtcctcattttatgtatgctacccttcagtacgttctccccattttagatttctaggattgaaaggcttactttataaattagtcatgtgtattgtcatatttggctttgctatatactttaatttcattgttaaaattttgtactgttagggaatatctgtatagtttatttaatttatgttaaaacctatttttgaaaaacaaacttgccttgataatcatttgggcagcttggataagtatgcaacttactttccaccaaagaattgccagcttttctgagatgtatcctgttgattttttcagaatttttttttcttttttgagaaggagtcttgctctgttgccaggttggagtgcagtggcgtgatcttggcccactgcaacctccgcctccttggttcaagcaaatctcctgcctcagcctcccgagtagctgggactacaggagtacaccaccatgcccagctaatttttgtattcttagtagagatgggttttcaccatgctggccaggatagtctcgatctcttgacctcatgatctgcctgccttggcctcccaaagtgctgggattacaggcttacaggcgtgagccactgcacccagcccggaagatttttaacagtctgagttaatattaaatttaatcacactctctgaatgttatctatttcttttttaatcaaacaaagaaaaaaaaacaaacttaaatttcattttaaaactgaaactcattttgttcatgtggatacaaatactaaagcaaaatttttttcttcatattgattcatttattggaaaacttttgagtatatttgcaacaactcgtgtatgtgaaattactttttcaaacgtaaattcataaaatctaaatacacataaaatgcttccgatgaaaatttagtatctgaattaaaataagctgtacatataaaatataaagtagatttcaaagaattagtattttagaaatcatcttgttttatgtcttgatttaaaaatataacatattaggctaaacacaaaatagtattaaagttgattttaaaaattacatatatggctcaggttacacttctattggaaaatgctctgatcaagcatgattatcagggtgagatcaatgcctacataaagtattccaatgattttcttagactttttgacttgaacatgattcccagggctctaggaatccagaaatatgctgtgacacagggtttggtttttattttataattggttggcttcataatcatgtgtatgtgaagactatatagaatttaaaccaaaagcctctaaaaatctatatgaatataaaagatgaaattgtttagcttagtcaaaagaaaggcaaatgatgagttatgctcatttactcattgtcctcactattttaatgaagaagattggttatcagtatgttaccataaccatatttctaagccaagaatagaagaagtaatgtttggcacagtaatctttgtcttttttctttttgaagaacttaacaatgaccatagatcataggctaattactgaaagcatttcttggtaaatttcagttatgattccattcaaataggaaatatgtacgtacatttttcccttttttgttttatttgaagaacattttgttagttcttttgaaattatatgttttctaaataaaatttcttcataacaatttatatgttttaatttttattctattatttttaatgtttactagatggaaacatgcaaaaaaagaaaaagaaaaaaaacctcgtcgtttactacatgtgagaagaaatagggaattagggctgcagaaaaaaaagcaataaactttaacctatgtaagaataataaatcaggtaactcacttatttgctatttctacatgaaatcttaatagaaaatgttattgcctgaatgaaattcaccaaagcttgatagaattgttccttctaacttctagtatttctaggagtcactatactcccaccatggtcagcataacacataaataccttttagggaatatagatgctcattaaaaacagtctgaatatctctctaaaattttaatctatgagtcttacgtcaaataattatatttttaaaaagtaacatataaaataagttttaagacaatagtttctttttatatcaaagcaaaatataattaaaatgtaaaagtctaaacctgggatacaacaaattgcacttggataattttttaaaggacagaagattaatttgacataaaaattaacaaagcccaaagcattgctgaaaagggtcttaagatttcagtttagattaacaccttcaaagttagaatcaacttaagttttcttacatactttgttaaaatttttgtaaagggaagaatataaatttttataaccttttaaaactttgcttatcaaaagcattaaactgtacttattttcatctgtggtgatatttttaaatgactgaaaatgaatattttgacttcaaaagccatataactccttggcggcattactgaatgtgaaaggctatttcaaggagtctaaaagaaatagactattaaaaactctaaatttagttatttattatatcttcttcagggtagtttcagtagtaataatatggagttaacttatttttgcactagatgtaattcatttcattctgttcataataataatttaacattttttgtaataggaaggaaatagaccatgatcaattttagttacacattaatgtcaatatttactttattaacgataagcagagcttttgaaaataggtttatcaattgaggtacaaggagagatacatgctcactcctttacccacaaggcctgtgagcacatatgtatatatgaacatgtatgtccccatatcacttcgtaatatgaaaactggtaggcagaaaataataatttgacaaatacagaatctcagcaacatagaactaggaacacaagtgacttagaatcacacatatcccttgcctgaagctaaactaagagccaaaattatgctccaaaaacttagatgaatagtataagacacagaattcagtatttgtagaaagatcaataaattcttattttttttattattatactttaagttctagggtacatgtgcaaaacgtgcaggtttgttacatgtgtatacctgtccaatgttggtttgctgcacccattaatttgtcatttgcattaggtagttctcataatgttatccctcccccatcccccaactccacgacaggccctggtgtgtgatgttccgcttcctgtgtccaagtgttctcattgttcagttcccatctatgagtgagaacatgtggtgtttcgtttttttgtccttgtgatagtatgctgaggatgatggtttccagcttcatccatgtccctacaaaggacatgaactcatcattttttatggctgcatagtattccatggtgtatatgtgccacgttttcttgctccagtctatcattgttggacatttgggttggttccaagtctttgctattgtgagtagtgcctcagtaaacatacgtgtgcatgtgtctttacagcagcatgatttatattcctttgagtatatacccagtaatgggatggctgggtcaaatggtatttctagttctagatccctgaggaatcaccacactgttttccacaatggttgaactagtttacagtcccaccaacagtgtaaaagtgttcctatttctccacatcctctccagcacctgttgtttcctgactttttaatgatcgctattctaactggtgtgagatggtatctcattgtggttttgatttgcatttctctcatgaccagtgatgacgagcattttttcatgtgactgttggctgcatacatgtcttcttttgaaaagtgtctgctcatatcctttgcctactttttgatggggttgtttgatgttttgttgtgaatttgtttatgttccttgtagattctgtatgttagccctttgtcagataagtagactgcaaaaattttctcccattctgtaggttgcctgttcactctgattaggtaatttcttttgctgttcagaagctctttagtttaattagatcccatttgtctattttggctttcattgccattgcttttggtgttttagtcatgaagtccttgcccatgcctatgtcctgcatggtatagcctaggttttcttctagggtttttatggttttaggtctaacatttaagtctttaacccatcttgaattaatttttgtataaggtgtaaggaagggatccagtttcagctttctacatacggctagccagttttcccagcaccatttattaaatagggagtcctttccccatttcttgttttcatcaggtttgtcaaagatcagatagttgtagatgtgtggtgttatttctgaggcctctgttctgttccattggtctatatctctgttttggtatcagtaccacgctgttttcgttaccgtagacttacagtatagtttgaagtcaggtagcgtgatgcctccagctttgttctttttgcttaggattgtcttggcaatgagggctcttttttggttccatatgaactttaaagtagttttttccagttctgtgatgaaagtcattggtagcttgatgggaatggcattgaatctataaattatcttgggcagtatggccattttcacaatattgattctccctatccatgagcatggaattttcttccatttgtttgtatcctcttttatttccttgagcagtggtttgtagttctccttgaagaggtccttcacatcccttgtaagttggattcctaggcattttattctctttgtagcaattgtgaatgggagtttacccatgatttggctctctgtctgttattggtgtataagaatgcttgtgatctttgcacattgattttgtatcttgggactttgctgaagttgcttatcagcttaatgagattttgggctgagacaatggggttttctaagtatacaatcatgtcatctgcaaacaggtacaatttgacttcctcttttcctaattgaataccttttatttatttctctttcccgattgccctggccagaccttccaatgctatgctgaataggagtggtgagagagggcatccctgtcttgtgccagttttcaaagggaatgcttccagtttttgcccattcagtatgatattggctgtgggtttgtcataaagagctgttattattattctgagatatgttccat

SEQ ID NO: 93998 - DNA, 13234 bp, Homo sapiens
ttctttattagcaaagaaaacagaagaaaatctttacaacaaaaaagtagttttcccataaaaaggtagaatacacacacacacacacacacacacacacacacacacacacatgaactcatttttcattggtccattaattagagaacaattaaacaactacatgaaaattaaaattgcctactattagaaatacatttcaacttagtctagggatccaacaaatttttaaatgaatagacaaaaattatgttaactgatgagaaacaaaacacagcctattaagctcatgtactatggcttataaagtatctgtgaaattctcagctccatgattccctgcaaaaaactgaaaatctaaagtatagacaccttctttaacaatgaaccactgataaaaatatatttgaaagcggctgggaaaataaagtgttctaacacatttttcgtattttatgacgttctttcccaggacgggtccttctaagttttagaagggaactaggaaaattgcatacattctaatcttccttacatgtgttgggtttctctctaatttgagtttttaattttttcacgtgttctaatgaaactagaataactgaaagctttaacacacttcttacattgacagaggtgttttgttgttgttgttttttaccacatataagctctttcatgctttcgaagggaactggaacaactgaaggctttaccacatttcttacattcatagggtttttctccagtatgagtcctttcatggcttcgaagggcactggaagaagtaaacgacttaccacattccttacatccataaggtttcactccagtgtgagttctttcatgctcacataggttactagaatatttgaaggctttaccacattgtttacattcatagggcttttctccactgtgagtcctttcatggactctgaggactctggaacatctaaaggctttgccacattttatacattcatagggtttttctccagtatgcgttctttcatgtattcccaagtaagtggaacgactgaaggctttgccacattccttacattcatagggtttctctccagtatgagatctttcatgttggcgaagagaactggaaaaagtgaatgatttaccacatttcttacatgcatagggtttctctccagtatgagttctttcatgttcacgaagataacttgaataattgaaggctttatcacaatgtttacatttatatgttttctctccagtgtaagtgctctgaggcatttgaaatacactaggaaaatcaaaaggcttctcatacactggacccttataaggcccattactagtgtgtgttaccatgtgtctgtcaacactggtgagagagataaaggctttcccacattgtttgcaatgatataacttctctggacattcctcacactcaaatagtttgtttccaatgtgagacaggatgtgcctatgaagggctgaatgacatatgaagacttttccacacacactgcattcacatggctttactccagtagaaactttcttattcagattcaaatttgaatcctggctgaaggtttctccatattgactgccttctttaatttcaaacagtctctctaccacatgactgctgtaaaaatgataaacatcattaatggtacatttattcatggtttacattgctactaataccatggaaaatgcaagtttcctgccatatctaaattgttttaaagtaaataaattaattactgtaagatatgggtcccccatagctattatcattattatcataattgtgatagtcacatgtacagtatcttggtggtgtttccaagtaaaatattctgaaaatattgaacatcaatgttacattcaggtgtattttttgctaagacttttctggaaaaaaaaaatttctagtggttcttagttgttttgtctgttttaaaaacttatgacatgctaagattccctcaaggggcatttttgctcttgtgaatgcaaattaccttagatttctcccaggatttttgaagtcatcttggatattctggtcttctgatttgtttcctaaaaggtacaaccataagattattcaaatgattagaaactttaaaaattgctagattcaaggttcactatacactgtgaccataactaatttttttcaccaaagtactccctttccacatgccaaatcaggaaacattcataaccaagaaacacttgttttcttcttcttttcttttttctttctttcttttttttttttttttgagacagattgtttcttcgttgaccaggctggagtgcagtggctcaatctcggctcactgcaacctccacttcccaggttccagcaattaacctgtctcaggctcccaagtagctgggattacaggcgcctgctaccacgcctggctaatttttttatttttttggtagagatggggtttcaccatgttggccaggctggtcttgaactcctgacctcaggcgattcacccgccttggcctcccaaagtgctgggattacaggtgtgagccaccacgcccagccaaaacacttgcgttgtaatcaactacgtgaataagtgttgttattcttacctacagaagccaggttcctgaagatttcttgcatcacatctctgtagagattcttttgagaaggatccagcaaagcccactcctcctgagtaaaggccacagccacatcttcaaatgacactgaatcctagaatatcgcacatatgtggagaggaggatggcttagacagacagtactaagaatctatactcatctcataaaatcgtaacataattctgcagacttcaaacatttcttccatgacctggtcatcagaactttactctctgtctgcacttactgctgcccactcaacattcttcatgctaaaatgaaactattcagaaagtcaacagcagagtaggaacacctgtctcattggcaggtgcagggaataaactgtgctgtaagaaatgaggtcacccctaatttctatgtgtagattttatcttaagggcctctcataacgaagtcatgctatttgttgtgtataacagttagtattaagtcttaagactacatatccttagaaatacctgctcacaaagtctgaccttttggtgtgagaaaatagatttttttgacggatctcatcaccctaagtgagtggttcacaatatgtaaacaatcttatgcaaacaatatattattcgctgaactccagttttgttttgtttctgaaagcctactactttactccattcttgcagtggtacctaggggatcagctctgaaaaacactctgagcattaagtctctaatgagcattcttggtaaacaatatttctcatatgctgttacaacttgttaactggagaaatgaggcatcaacgtgattataataagaaaatatttggaagcttgcaagtagtttactccagaccaaattaaatccagttgtaaataagactgataatttatctttaataacaaacaaaacaattttaaaatttctattggataacaacaaagtgcaatggagtaagtggaaagatagtacgtgtgcttagaagaaactcaatgtcatcaagatatcacctctttcaaatagccttaaaaaattccatcaatccccaaaacagacactttattagcaactgaaaactacttttccaaacctaacaaaaaaaaaatgtctaagaattgtcaaagtcttccaaacaatagggcaatggcttccttaccatgtatcagaattttcaaactataatattcaggacagtattaatgtggagataaacaaatagtccaaaagggaaaaaagttttaaataagcaggaatttatttttattttatttttttattttatttttttggtgagatggagatttactcttgttgcccgggctggagtgcaatggcgtgatctcggctcaccacatcctccgctgcctcccaggttcaagcgattctcctgcctcagcctcccgagtagctgagattacaggcatgtgtcaccacgcccagctgattttgtatttttagtagagacagggtttcaccatgttgcccaggctgatcttgaactcctgacctcaggtaatctgcctgccttggcctcccaaagtgctgggcttacaagccactgtgcctggcctgtaagcaggaattttgtatgtaaagttcattaatgacagagcattccagaatagtggaagaaatcaaaagcactttaaaacatacagtagagcaaattggtactaactgaaaaagtacattgcattcccctctattccatgaacaataatcaagttctttatttcaaatatgaaagacaaaactaaaatacgttcagacttcgaaggaaaacaggggtatttttggacagaaaaatgggcagaattcatttaaacagaaaaaaaggaactggcaaattcacatatattaatattcaggaaattaaaaggcaaaaagcagtgggaaaaaactgtaatacatgcaatataaaagaattagtatgaagtgtaaaaatgaacacgatttaaaagtgagaaaataagcaaagcatacttaaaagaagatgaaagaccacctatttttttaaaaagtcaacttccttggtaatgagaaaatagaaaatagtcaggtatatgacatttgaaattgactagaagaaaaaaatcaactccatgtgatgacggccatggcaaacgggttactcacgaaggaaggaggagtcaactgataccctccattgctctaatttgaacttaccacaatgtgtagcccattaatttttctaaaatgtccagagaatttacggtgcatttgcacttggagatgtggcataaaatcataggagcattatttttcccaaaagcaaaaaaatacaattgaaaaagccctcacatcagaatcattaaaatggacggctgaattaaatggtccacagcctcaggcactagcatgtgtgaaacatactgacacaaggaaatcaccaataaacctttttgttttaattccattcatactcattttagaaagttcaagtaaagcaaaatggaactgaaaaattacagatgataaaaatgcaaaaaagtagccaaacaatcacaacagtggtcaactaagagataagtctaggtgggaaccatcagaaaactcttaatgactgtaggaggcccagttaagaatcttaattataatttccaagttgcttcaactattgttactaaaactcttgacaaatgttttactcattcttactgtatttcttaatagaaaacttaaaaattaattaaaatgtaaaagaacacaatttttatgtttctttgccttataacgtgatctgagtcgtgatttacagatttcacagaaataagtaaattgagcagcacagctcacagtgctagttgctcagcaagcagctaaagtacacaccagataccaggcggcagaaccgattagcaagtcattgcgagagaagacagaaccacatggtggtgggcaatgtctgaacattctgctagtggtactaagtgcgatggtcacgggcagagatgtgtttggaaagggtaggaaattattactcagaaaattgacacttgtggatccattaggtcaggcctttcaaggtggtttgatatggtttgaatgaggaagaaaaggagccaggcctgtgttttctgttgagggtaggtggaaagctaggatgagaattcagtttcaagggaaaagatttacatggtttcaatctgctgccaaaacccagagagagcacccaggcttgttttcaccatatcctgatgtgacgtcagaagtagaagaaagtaagtttaggattaaaagttgacagcagtgaattaaagaaaaaaatggagacagacacttctgatttccagtagagcaagtaggcataaaaggcaatggtcaagcttcctaggttgagttctgagttccatgaaaatgtctgaccccaccacgctgtctgagctactgaaatgttattaccagaggctctttccctattctctgtactgtaactggctcaactacagcagagtgataaagaattactcccaacactgtgaattttcattcacattgaaagatgacattacattcgataccaatccttcaacaaccagagtgatctggaaaaggagatgcagaaagtgaatccatacaagattgatataggtgcagtatattcccacagacccaatcaacacaatacagtgargctgggagctttccaggctcaggaaaaagaactggtgtttgacactgacatgacagacatgacaatgtgaggagatgctgtagttctgcagatacatgttctacgtgctggaccctcatgacaagggccatacgcatcactaacacagcactgaaggaggactttggatttaagcattgtctctgggtatattctggaaggaggggtgtacattgtttggtctgtgataaatcagttagaaaactgtcttcggtggtatattctgggatagttgagtatttgagccttgtaaagcatggtcaagatgttaaaaagaaagttcacctaactgaaaaaattcacccttttgtcagaaaatctataaacataataaaaaaaactttgaagaatatgccttggttaatcaagatattctcaaaaataacaaaagctgggataagattttagcccttgttcctgaaacaattcaggatgaacttcaacaaagcttccaaaagtctcacaattcacttcagcattgggagcaccagcagatgtcagaataacatcaaaaatcaaaatgtggatcctggctgcagtgggagattatgctccaggactgtttccacgatggggtatcaatgtcaacaaagaaatcaatcatttaccgcagagcccttttagcgttcatcctaaaacaggtcgcatmtctgtgcctactgatttgcagaaactggatcggtttgatccatttactgttccaaccataagcctcatctgccatgaactggatgccatttccactaatgaagaggaaaaaaggagaattaaactgaatctgatattaaacatagaaccagagatataagaccagtctagcaccttatgtgagtttttgaacaacttcttgaaaacctgggtaaacaccgaaaaagagaacttcttaagaagagtgatttacaaaaagatttcagaagacaatgctcctcaaaccaatgtgggtatcttctgccttcaaccaaggatcaaatgctccaagagccatttaacaaatacagcagaactatgtatgtgtcttaatgctcaaagtaaattttcctttgcttgagaaataatttatgttgaaaagatttcctgagaccaccaaaggagactgtcaaggttcacggaaggagcaataaaaggagaaataattggaaaaaaaaaaccccaaaaaacaaaggcaacattcaggctattattagagtctttaacagatggtggcaaagtagcgcagaaaatggagcacttacacactgctggtgggaatgtaaattagttcagccattgtgaaaagcagtttgaagatttctcaaaaaacttaaaacagaactaccttttgacccagcaatcccattactggatacacacccaaaggaatataagttgttctaccaagaagacacatgtacctgtatgttcatcacagcactattcacaatatcaaagacacggaatcaatccaaatgcccatcaatagtggactggattttttaaaaagtggtacatatacaccatggaatactatgcagctataagaaattaaatcatgtcctgtgcataaacatggccacagctggaggccattatcataagcaaattaatgcattgacagaaaaccaaataccacatgttctcatttataaatggaagctaactgttgagtatacatggacacaaagatgggagcaacagacactggggcctacctgagggggagaatgggaggaaagtgagagtcaaaaaactacctatcaggcactatgctcactatctatgtgacaaaatcatttatgcagcaaaacacagaaacatgaaatttactcatgtaacaaatctgcatatgtaccccccagaacacaaaagttaaaaaaaaaaagcaacattcacattcacaataaaaggcaaataaatttaactaaacaattctaagattaaccattaaagaactgagttcccagtaaaaactaccaaaccaaattagagagacagagaggcacatccagagaatcgtaactcacttgatgagaaaaccataagaatcctctaagagtagcagtacgtgtataggaaaaaccaaactgaaattggtgagctgctcaagtttgagaacatctcctgggtgcccaggcttagggatccccagtaatttatgagttttacatccacaaacattaccagttgatacggtttggctgtgtgtttcctccaaatctcatgtttaaatgtgacctccaatgttggaggtgggcctaggggaaggcatctgggtcatggaggcagatatctcataaatgactcagtgctgtccttgaagtaatgagttctctgttggttcacaggagagccgggtatttaagaggctggaccttcctcctcctctctctgactccctctctcaccatgtggcttgcctgttccccctctgccttccgtctgaggcatcaccagaagccaagcagctgccggtgccatgcttgtacagcctgcagaaccgtgagtcaaataaacctactttctttataaactacccagtcttaggtattactttatatcaatggaaaaatggaataatacataaaattggcactgaggagtggggtgttgctataaagatacctgaaaatgtgaaagcagctttggaactgggtaacatgcagaagctggaagactttcaagggctcagaaaaagacagggagatgaggaaaattagaactttttagagagtggttaagtgattgaaaccaaaatgttgacagaaatatggacagtgaaagccaggccaatgaggtcttagatggaaatgacaaagttttggtgagcttgagcaaaggtcacccatgttacaccctggcaaagacttggctgcattgtgtccaatgccctaaggatttgtaggaggtttaatttaggagtaataacttaagagtctccagaggaagacatttctaagcagcaaaggattcaagaggtggtatggtcgcttctttgcccccacaatcagaagtgatttaaagttgaaacatgattaaaagagaagcagagcataaaagtttggaaaatgtgcaacctggccctgtggtaaagagggaatccaagcagcctgtggagcaatgacttgtaagagagagttgcacaactaaaggggagccaggtgccaacagccatgaggctaagaaaaagacctgtaatgcatttcagaaaactgtggcagcccctctcaccacaggctcaggggcctaaaaggaaaaagtttggggtaccaggtcgaaagcatcactgccctgtgcagcctcaggacactgctccttgcattccagtagctctggttccagctttggctaaaaaggcaccatataccacttgggccacggttccagagggcacaagccataagccttggaggcttccgcttagtgttaagcctgcaggtgcatagaatacaagagttaaggaagcttggtagcttccacctaaatttcagatgtatcaggaatgtaggtgcccaggcagaagcctgacatgagtggaaccccacaggcagcctctactagggcagtgccaagagaaatgtgaggatgaagcccccacacagagtccccacagtggcactgcctagcggagctgtggaaacagggctgctgctttccagaccccagaatggtacagccacaagcagaaagcactgtgagcctggaaacgttgcaagcatttgactctagtatgtcagaagtcacatgggctgcatccagcaaagccacaggaatgaggttgcccaaggcaacaggtaaatacaccggttccaaatggaagaaatggccaaaacaaaggggctacaggccccatgcaagtccaaaatccagcagggcaataaaatcttaatgctccaaaatgatcgcctttgactccatgtctcacatccaggtcctgctgatgcaagaagtggactctcatggccttgggcagctccacccctatggctttgcagggtacagccccattcctggctgctttcacaaggtggcattgtctgtgacttttccaggtacacactgtaagctgtcagtggatctaccattctgggtctgcaggatggtggctctcttctcacagctccactaggcagtgcctcaatgggagctttgtgtgggaattccaaccccacatttcccttccacactgccctagcatagattccctatgtgggctacaccactgcagcaaacttctgcctagacatccgtgtatttccatacatcctctggaattgtggcagaggttcccaaacctcaattcttaacttggctttgtgtggggattccaaccccacatttcccttccacactgccttagcatagattctctatgtgggctacaccactgcagcaaacttctgcctagacgtccatgtatttccatacatcctctgaaattgtggcagaggttcccaaacctcaattcttaacttggctttgtgtggggattccaatcccacatttcccttccacactgccttagcataggttctccatgtgggctaggccactgcagcaaacttctgcctagacgtccgggcatttccacacatcctctgaaatcgtggcaaaggttcccaaaccttaattcttaaagttttctgtacccacaggcccaacaccaagtaaaggctgccaagacttggggcttgaaccctctgaagcaatggcctgagctgtacattggtctcttttagccacagctaggacacagcaccatgtcccaagactacaaaaagcagcaaggccctgggtcccggatcatgaaaccatttttttctcctatgcctccaagcctgtgatgggagggactgccgtgaagacctctgacatgtcctaaagacattttccccattgtcttggcaattaacatttggctcctcattacttacataaatttctgcagctggcttaaatttttcctcagaaaatgggttttcttttctatcacatcatcaggctgaaaattttccaaacgtttatgctctgcttctcttttaaacataagtttcaattacagaccacctttttttgaatgcataaaactgaatgcttttaagagcacccaagtcacctcttgaatgctttgctctttagaaatttcctctcccagataccctaaatcatctctctcaatttcaaagttctgcagatctctagggcaggggcaaaatgctgccagtctctttgctaaagtatagcaagagtcacctttgcttcagttcccaagaagatcctcatttccatctgaaaccacctcagcctggacttaactgtctatatcactatcagcattttggtcaaagccatttaacaagtctctagaaagttccaaacttacccacatcttcctgtctccttctgagccctccaaactgttccaacctctgcctgttacccagttccaaagtaacttccacatattcaggtatctttatagcaccaccccactctctacagtaccaacttactgtattagtccattctcacattgctataagaaaatacctgagactgagtaatttgtaagggaaagaggtttaattgactgacagttccacatggctggggaggcctcaggaaatacaatcatggcaggaggcgaaggggaagcaaggcaccttcttcacatggtggtaggaagaagaatgactgaaggagaaacttgccaaacactcatcaaaccatcagatttcgtgagaacaattacttccacctggtctctcaattcaaggtgagacattgggtggggacacagtcaaatcatatcaccatctcaatgccgctccttgttattggtctgtttagagtttctatttatttcttatttaatctaggagagtttcataattccaggaattcataaatctcctctaggttttctagtttgtgcacataaagttgttgaaagtagccttagtaatcttttgtatttctgttgtattgtttgtaatacctcctgtttcatttcttttttttttttttttttgagatggagtctcactctgtcatccaggctggagtgcagtggtgcaatctcagctcactgcaacctccacctgccgggttaagtgattcccctgcctcagcctcttgagtacctggaattacaggaatgtgtcaccatgcccagctaatttttgtatttttagctggtctcaaactcctgacctcacgacctgcccacctcggcttcccaaagtgctgggattacaggcatgagccaccatgcctggccctcctgtttcatttctaattgagcttatttagattttctctcttcttttcttggttaatctcactaatggtatatcaattttgtttatcttttcaaagaaccagctttttgtttcatttatcttttgtattttttgtttgtttcaatttcatttagttttgctctgatctttgttagttcttttattctgctgggtttggatttggtttgctattgttcctctagttctttcaggtgtgaccttagatggtctatttgtactcgttcagactttttaatgtaggcatttaatgatacaaacttttgtcttagcactacctttgctgtatctcagaggttttgataggttgtgtcactactatcattctgttcaaaaagtgtttaaacttctatcttgatttcattgttgacccaacagtcagtcattcaggagcagattatttaatttccatgtatttgcatggttttgagtgttccttttggagttgatttccaattatactccattgtggtctaagagtgtacttgatatgattttgattttcttaaatttattgagacttgttttgtggcctatcatatggtgtatcttcaagaatgttccatgtgctgatgaacagaatgcatacactgcaattgttgagtagaatattctgtaaa

SEQ ID NO: 93999 - DNA, 12519 bp, Homo sapiens
  misc_feature (1)...(12519): n = A,T,C or G
gtgatgaccaaaacctgggaatgggcccagttgtccaacaattgagtaacccaaacaggcgccttcacattaacagcaagaatcctggcaggtatgcagactgtgtcaaacatgaaattttggcaagtacatgagaaggtatattagaaataaatgaaacaaaaaaaatcgtttgtacacactaaaactatgtaaaatgagcagctataagaaccagagaatacagtacttcttaaataaatgggatttttttctgtaaagatacttaagaacaaattaaatttcaaaaaatggaaaaaccactccgaaaagcaacaatctgatatccattaagtaataagaatgttaagaactgtctccctggcatgtcagagataaacccgaagatagggtgaagccccagccctgtaaaagttgcattttgatccaaaccattggattagttggagcctcttctttggttttaggttagttaaaaccacccctagctggactcatgcaggaagaggccccgatgatccatccaatgcagcttttccctttcagatagtaacactgacttcacatccagagagtcctttaagtctgtgtattgagctactcattcagacctccacagaggccaccaggagaacagagggagctagacactcccacttatgcattggagcaaaataatgagataatctatgattatggattatttttctgatgacaaaataatatgcaaggcaaaaggagcactctgtctagcggggcgtggtggcctgtgcctgtagtcccagctccccctgaggctgagttggaggcctcctccattgagcccaggaggccaaggctgcagtgagctgtgatcacaccgctgcactccagcctgggcaacagagtgagattgtctcaaaaaaaaaaaaaaaaaaacactgtggttctcagtttccaaattaattttgactggttgtatatttgtatgtagcttggtggaataacaggaagccatggtccaaataccgaacatgaaaaccttattttaagagtagtgatcaacaagatatatatcctgggcatgttctacatatacttatttatatagaccagaaaaagccatggtacagaagatttttacccaagacctatcccattgtctacctggaagaagagaaaatgaatctgttgatatgagttaaacctttttgcaggatggggtaagggtaaggaggaggttagtacaacaattcttgttttcaaaagtaatgcacaaatgcattcttgtaaaagttcaaacgaaccagaaatatatggaacataatctaaaatttactgttctgactatatttccacatacattcttatatcactcaaggcctttggccattctcatacatatgtattatagatacatgttaccttttccccacagacatgaaattataccatatcatggtgtttggcaacttggttttttcccttcattactaatatgtcctagaggcgtgtccatgtctataggcagagatctgcttcattccgcttacctgctgtcctctactccccagtttggatgtgccacactgtaattattctctattcgagagcatagtggttaagaaacaattgccaaaatcctgccccaaacacacacttgccatgtgaccctgagcaagttacctaactcctctgtgtctcggggtcctcacaatatttgttataaagtgcttagaaatgtgctggccctcaatcaatgctagatattattaatattttctcactgttaaaatgatccattgacatcctcgtatcctcatatttgaatagtatagattcctaaaagtggaattgtcataacaaagggtaggcatactgtaaatacagatgctgccaacctgttatttatttatttattggaggcaggtttacattctgtccttcaggctggagtgcagtggcacgagagatcttggctcactgcaacctccacctctagggctccagcagtcctcccacttcagcctcctgagtagctggaactgcaagcacacaacaccatgcctggctaatttttgtattttttgtagagacaggattttgccttgttgcccaggctgttctctaagtcctgagctcaagcgatccactcacctcagcctcccaaagtgctgggattacaggggtgagtcacagagccgggcctcaacctggcctttaaaaagacgctacccgtttacattctcagcgtgagtagaagaaactgcccatgtcccttcacctttcccagtattcaatattatatttttaattgttgtcaataaaatgggcaaaaaacgccatcttgttctgacttgtattcccttaattactactgaagataggcattttgtctatctatttcttctgcaattacctgtttatatcttttatccattagttttgtctctttttattatttataagagctccttatgtattttggatattcctttttgttatattataatagaatatattaaaatatgttacagtttgtgaagatttttttccagtctgttgcttgtcattcagttttgttttttacctgttatgcggtcaaatcggttgatattgtcctctacagcttctgggttctgtatctgtgttaaggaggatttccaacccagtttttaggtcacacagaatactggaattgcaacaggttatgaggaaatggcagtttcctaatattctcagctcagctcatcccaaattagctgtggaagggggttccctgggcttgctggtctccaagggaactcctgctgtgactcctgttgccacgcgactcgggccagggttgactgctcctttctaacagagtccccagtgtgtcctgagcacagttgagacaggcaggaacttggacagaaacttttgttcaatagtaaggaagaacaatggaaaaataaacacggaaaatacagggcatttaaccaggctggcctatcaatggataaggcttggattgcaccataactgttcatagcttgctctgcagaacttagaaactccactccgtttcatatgaatttcttttctctgtctcttcattcccaatggtctatttgacatccactacccagcaatgccttcctagccctcctgatgcttcctcacccagactgagggtccaggcctccttcttttctctgagatccatctcctcaagtttcagttttttatttgaggaatctgcctcttcctcaagaattaattcacctttcagatgcaactttaccctctccacccatagctagtgctggaaaaggaccatttttgtcttttgaccatgtggcttttgtaattactcttttaattataactattattttaaggactaactatgtgctaggcagcacgctttatagagattatcttaattcttgaaacagccttttgcttacggtaatattactatgcccattttacaggtgatgtaatgaggactcatatatatgcacatggagtgaataaatgaattaaggaatggatgggtgaaaacaacgaactgtgaatggtccagccatcaccaataagacacgtaacaacttttcccatctcgcttcacgctgccaggcaacgcaggctggcattgttgtagtgagttgcttctgttccacacaagccaggatttaataacagaataaaggaatgaactcgcaatacaaaggtgtcattatctttgtaaactcctctactataaagggtacagggtttaatggtttatgaaatagagtttcatcctaagtttcattcatggttctggtaataattcccagrgtgaatgagaaaattgccgaacccctctgtgagtcagttgcctcatacacaaaatagaattaatgaagcttggttgtcattaaggcttcttaagatctgcagatgaaagatactgcattcatccaacacaaattattcaccagtatactatgaaagactctcagaagagaaagctctggtcacagctcagaagtgcacttagaagtaaatggtaagtcactgcaaaaatatgtaccgtgtaaatgtatatatttgagaatggtggtcccgagaaatgacttggaggatcctggaaaactaagtttgtttctggctctgccagtttggcaggggaccttgatgtcatacctggcaatctcattttccccattagtgaaatagaagtggctctgtgatgctttatgtgattttcctgctcaaaaactttcactgggtctcctatgattgtgcgtgaaatcctcagcctggaatctggtctttctacagatgtcaacacctcccttttcagacttttcttccagtgttcctcttctctttttctcaaaatggaacacccttggctgattcctctttggttaagacgatttccacccatgtggaacggcacctctctgcccctctccacccgtgaagtccctactcatccctcatggaggcccctcttccttgagtgaaggcttgattcttactgggttctagatcccctttagcctttaacaaaatatttagcaaagtgcttgcctcacatgcatgagaagaacaatatttccatttccctttcaatgcttttcacatccaaaaccttgggtctgttgttagtccagagtaaattagtaatttcccattattaaccatgaagaatacttttctactattccactctccaaaagcttcagttcagcaaaactataaactgtgtaggatgtatcattcacagaagtaaccatgccattcccacctctgtgcctttgctggtgctgtcccaccttccctagcctctcctcagtcctctcccctcatgacccaccctggaaggcattcttctctcaggccagtttcctatctcctgctttccttctacattcaatttgagcatcgtgcttgcgggttctgtggtagatacaaaaggaactgagtatgggttctttctacacagagtttgcagtcaagaattgttgatgcaagctagaaatagtggcgtatgcctgtagtcctagctaactgggaggctgaggcaagagaatcacttgggtccaggagtctgagtttagcctgggcaacatagtgagacaccgtccctaaaaagaaacaaaaaatgtttaaggaattgttgattgaatagatactcagtgtatttttaatggttgaatggttgagtgaatgtataaatggaaaaacacaaataattttaattcaacaaacataagtgcctgaagagattcacagataacatactgatgcaagagatgtcttccagcaggggaatcagggaaaagaggtgacacgtggtctgggtccttaaaagttagcagagttggccgggcgcggtggctcatgcctataatcccagcactttgggaggccgaggcggccggatcacctgaggtcaggagttcaagaccagcctggccaacatggcaaaaccctgtctctactgaaaatacagaaattggccgggtgcagtggctcaagcctgtaatcccagcactttgggaggccaaggcgggtggatcacctgaagtcgggagtttaagaccagcctgaccaacatggagaaaccctgtctctactaaaaatacaaaattagccaggcatggcaacgcatgcctgtaatcctagttactcgggaaggctgaggcaggagaatcacttgaacctgggaggtggagattgtggtgagccgagatcacgccattgtactccagcctgggcaacaagagcgaaactccgtctcaaaacaaaaaaaagaaaagaaaagaaaaagaaaatacaaaaattagctaggtatggtggagtgcgcctataatctcagctactcgggaggctgaggcaggagaatcacttgagcccaggaggcggtggttgcagtaagctgagattgtgccactgcactccagcctgggcaacagagtgagactccatctcaaaaaaaaagaaaagaaaaaagaaattaacagagttggcagacaccacagccaccaggagccccatactaccagccatggtcaaccccactgtgttcttcgacatcagtgtcagtggcaagcccttgggccatgtctccttcaggatatttgcagacaagctttcaaagacagcacaaaactttcgtgctctgagcactggagagaaaggacttgattataagggttcctgctttcacagaattattccagggtttatgtgtcagggtggtgacttcacgtacaataatggcactggtggcaagtccctctatggggagaaatttgatgatgagaacttcatcctgaagcgtatacgtcctggcatcttgtccatggcaaaagctggacccaacacgaatggctcccagtttttcatctgcactgccwagactgagtggttgattggcaagcatgtggtctttggcaaggtgaaagagggcatgaatattgtggaggccatggagccctttgggtccaggaatggcaagaccagcaagaagatcaccattgctgattgtggacaactctggtaagtttgacctgtgttttaccttaaccaccagaccattctttctgtaggtcaggagagtagccctgtattagtccatttttatggggatgataaagaagacatacctgaaactgggaacaaaaagaggtttaattggacttacagttccacgtggctggggacacctcagaatcacggtgggaggcaaaaggcgcttcttacatggtggtggcaagagaaaaatgaagaagaagcaaaagtggaaacatttgatagaaccgtcagatctcatgagacttattcactgtcacaagaatagcactaaaaagaccagcccccatgattcaattacctccccgtaggcccctcccaaaacacgtgggaattctgggagctacaattgaagttgagatttgaatggggacacagacaaaccatattgtcccctccaccccatttgctcacagtatcctataacctttctgttctcactgcagttccctttgggttccatgttttccttattcccttccatgcctagctggattgcagagttaagtttatgattatgaaataaaaactaaataacaacagcaacaaaaattcagcagagtttggaaacagaaagagagaacattcctccaggcagaatgaggccaggagtgggaaagtaggaagtaaataaaaggaaaaatgagtgatgactagggaaaagggcatacaggtggtcagaaagaggatggggggtagtcagtggaaagcagatgagggaaagcccaggtcctgtactaacttgcaatgtgatgtcaaagaaactaccacagtgccgtcctccaggactcactgcagttgcaaatgttaacataggataccatccaagggctttctgatcgcaccaccctctgctactgtcgcgctatgtaggcaggcaggtgggagggaaccttgcagcagtcatgggcaagatcgtgtggaacttgcgacacagcagagaggaagaaagccagtttgggggatattttactcatccacaggccaccatttgtaattaggtggtatatgatcatgattaattaaaaacttacaaagcatacaaagaagaaaactgtagttaaagtgattgatcattagaatactgggatacacttagtttccataaaagcctgccttattgcaaaatgaggacccactttaaacttcccggcatttagagtggcattttgatggccacggttgcctttgtcatattccatttgccttaaacaaagttggagcctccaagaagtgagcatggaagaggacagtccaccaaaagtcagagctgcaaggctgggagggtgggctggtcaaggtcctatctccgaacaggcagcgagcagtggggatgaggccacctgcaatagagtcagagaaacatggttccaggcctgtctgtccctttttacctctgtggcctcaggcaaattaactcacctctctgagcttcaatttctcttttaggattctggtgaggaacaagtaagagaaggctcagacagcgttcggcctatggaaaggtactccagaaaggctggctccttctcacctggcagaagctgataggattccagctgttgtttctttcattcattcattttctcatttgtttgttcaacaaagatatttatatcctggtaatacagtgaagaacaacagagaaataatccctgttggccattatcaaactaatgatctaatggagagggacagatattaaacagccacttactggctgtgtgaccttgagcaagtcacaaactgctgaactcttccctactggtaaaagctacaccacagacttgatttctgcattaaaataagaaaatgtatgtgaaggggccatgcaaatataggactgcgggcacacttccgaagtctgtaacctgcgacaacccccagcttgggtttgggcatggaagaggaggggaagggacccatcaggatgacccccaggtctcactaagctccatcggtgaagtaacaagattagttattgtatctaaatgctgtgaatttattttaaggtagataaagatggatgagtttaaaaaaaaaaaaaaccagaagcaagtggtaggttagtttgcattgattcttttgcccttttccagaagggagaaagggagggaaggagggaggaaggcagaaagggatggaggaagggagggagggagagaagggagggacacgaagggaagggaagggaggcgggatctgcctccaacattacaataaacggtggttaaataatgattctaggctcactcctgggaaaacattatcatttctaatcaatataatcatttcctatttctaagaattttctgaaggcgacatagaccagacttgtcaaacttttacataagagagctgataagatcgaagcatggctataagaaggaaccagagtgtcaggtctgtgtgtgtgtctgtgtgtgtgcacgtgcatgtgtgcatggatgtgtagtgtgtcagtgactctgcatgtggaatacttggtaaaggctttaggaactcaaaagtgtgggtggaaacaaaataagcaaatnnnnnnnnnnnnnnnnnnnngaggtaggaaggaaggaaggaaggaaggaaatgtgcaactactactactcagaagctgaatgccaatgaccactgtcttcaggtctttggattcttattgacattcgcatggatagtgtttaaacagagggtgggctgttatacacacagtcattgtttgctgtggcccagcaggatctacaagggaaggccgttcaaacctcaacattgatcacccggtgcagaggacgtggcggcctcgtgtttgaaggaaagtggtaaactttgctttcatcagctccgccacaaccctcaaagaaatagccctgagactctgcaggccagatgagagctgagagctcggaagaactcagtagagcagagatactgtggaagtgagaccccagccccagagcttcatgctattggaagtggtgggaatttccagagcatcagaggcatcagccctcgcgtagaatccccactctcactccaagacaagaaagtgacttagtgatgagtgcaggagcactcccttctggtgcctccaagaatgaaagccggctgtcctggctttctctgtggccacatccttggtataaggcagagtggtatttagtggacctatttactaaacaacaaaatggggtgaatgcctaccatgcatcaaggaccaagactggcaccaaggggaatgccaagataagaaaggcaaggtctgggctgggtgtggtggctcacgcctgtaatccaagcactttgggaggccgaggtgggcagatcacttgaggtcaggagttccgagaccagcctggccaacatggtgaaacatcatctccactaaaaacacaattagccaggtgtggtggcaggcacctgtaatcccaactactcaggaggctgaggcaggggaatcgcttgaacccagggggcagaagtttcagtgagccgagatcgtgccactgcattccagcctgagtgacagagtaaaactgtgtctcaaaaaaaaaacaaacaaacaaacaataaaaaggcaaggtctgagcttcgtgatctggggagggaaatgagacatatgcacagaggctggccaggagtgagtgcgtgctcagtgtatttatagcctgaacaaatgattgaatgaatgaacagaaggacataagcacgagcaagccacgtggtacagaagaaagaacacaggcttgtggcatcccagctcccccacttccagctgtgtatgagtctggagagttccgctagcttctagagccactgtccaccctgctctgcgccccaggggctgacctctatggactgcctactctgggctctctgtggtctatcttctggttgagctctgcccaaagggagagctggaaagagattgggggtgaggacagggttttaaccccctaaatccctggaaagagattgggggtgaggacaaggttttaaccccctaaatccctggaaagagattgggggtgaggacagggtttcttcccctctgccccagcttgacctctggcagcagctctgcacctcaatccctgcagctccgcggactgcattccattgctcactgggcctcagggaggttatgtcctctctctgccctcctgacctcagcttctcactgtcgctggggtctcagtgcctcaacatttcttgtcttcctttaattctgtctacacctctggaaagagctcctctatggaaaccatctgagttagttctatttcctgaagagacccaacttattcagtaaattagaggcaatcacagaactcgtcatagtcagattcctccactatgaaatggaaatagtagcaatacttagtatctagcacagttcagtgcctggacattggccctcatacatgttggctgcttaaattagtgaatacctgaatgaattaatggctaagaggattaatgatgatgttaacatacaaggtgtgagaatatgggtttttataattcttacaagtggcaaatgaatgtaatagtatcaactttcttgatattgtaaactgggcatgagtctggaatcaggaaagctagccccattcgtttattgtgtgattttgggcaaattattttcccattctgtacctctgttttctcccctataaaacaaaagggctgaaggtaataacctgtaagaacccatccgtcttggccatcctatcaagtactgagcattcaagagaactgtacaataatttgcattggagaagccaaggaaggcctcaggaaagaagcaggaacttgaagaatagaataataactagaatagcggaaggatctcccaggtgagcaagactggagcaggggaaaggtgggagaggcctgccaatgctggtgaccatgaaggacatctggctggatcagaagttggctatggggacgtaagagggaaaggctggggacataggctagggacacatacgaaggaccttgaccaccaggccaagaaactcaaaggacccgcaaaaggaagggttctgacttcctcaaggccccaaagctagcacagaactagacttgaggtttcctctgctcagccccgagttgatcaagatctgcctcttcaactcctgagggcagctgccttctcccttttgtgattcctttctttgaaggtcacttgtcaaatgagggacgagggaaaatttattgagtgaggaaaccatttggtaagggatatttttggcacaacaagtccttggcaaaggacttgttcctgtcattattctccttatgttttaaaatctgttagtttgccataaagtcaaaggcaagatcatcaaaagaaagtgattcgcttttttttgattactgaaaaaaagtgaatctagaaaaaatatgagtcttgagcaacaatattaattggagggtcctggacgtgaagtcataagtatttgaaaaaaaaatgattaaaattaacaatgagaaaaataatgcaaaactactgtaagataagtggagttatttgaaaaatgtgtccagctgtgtgaatttaggcaactcccttcccttcttgggcctcagtttccccatacgtcaaataaaggagttaaacacgaggatgaggtctagaagcctgtcctgccccgacagggcccatggctcccatttcaccactctttttcctctgttgagaacagcattcctgggagggcagttgcatcactttggtgtcggctcctctgatctctgtcccctgtgtggcctctcagagcacaggggctggagaactgaggcagctgctcagctctggcactttgtccggctgcggccagagatgaaaggattcagagccagcctgcaataaagctgggcctctgggtagaggtcatccagacatgccagtctcactgccactgctgggaacaggcctcatcaaacctgtcacagatgctcgcc

SEQ ID NO: 94000 - DNA, 14378 bp, Homo sapiens
agaggaaaaaaggtgatatttgagcatacaaatgaatgacaagaaggacaagccatgccaagaatctgggtgaaaaaattataggaagaaagaacagcaagcaaaaaagtcctaggcaggagtgttcttagagtttttgaagaatagtaaaaaatgccactgcatgtgtgatagtagtaggagatgaggtcagagaagagtcaggagatctgatcgtgaaaggccttgtaagcaaatataaagatttccaagttttactgtacgtgtgatgatagccataacagggttttgagcagaggagtgatgtcatctgctttatgtttttaaaggtaactctcactgctgtgtattgaaaaagctatagtggaagcacttaggagtacattgccatgtttctggggtataaattgagcaaacaaaaaatgttttatgggagtaataattgagtaagaaagttcaggctgttgagttaattaagctcgagtactgattgggcacccagtattgctcagcatttcgttaggttctataccaagactttgtctctgatatttagaatttaagggctatgaagacagggacagagtcttccttgttcactgctgtatccttagctcctagagttgcacctggtaggtgatcaagaaatactcattacatgattgaataaatgaatgtaggagctttagaacgtaaatcatacagtgtttttattttattccaatgagttgccaatatttaaaagtcaagaaattccatataaggataagaatgttcagcttttatggtgatattggagctctatttctgcatccatttagaggagatatgcactgaccagtttcaatagttcccactcagccagtttactcatatatattacctatctcatctgtataagcatcatgggacttctcagccttcctaatcacatgagcgaattccttctaataaatatctatctatttatctatctatctatctatctatctatctatctatctatcatctatctatctatctatctatgtatctatctatctatctatcatctatctatctgtctatatgctatttattctatttctctggataaccttcactaattcaaagacattttgtttatccatttgtctataagtggaaattagggttgcttctacttcttggctattgtgaataaaactgctatgaacataggtatacaaatatgtctttgagactctgcttttgattttttttgtatatacacccaaaagtgagattactaaattatgtggtgcattatttttgattttgggcagaactttcatgctgttttccgtaaggcttgtaccactgttggtgtacagtcctaccagcagtgcacaggggttccaatttctctgcatcctgaccaatacatgctattttctgcttttcttttgatagtagatattttaataggtgaggtgatatttcattttggttctaatttgaatctctctgatgattagtggtgttgaacatctttccatatgcttattagtcatttgtttatcatctttggagaaatgtttattcaagtcagttgcccatttgtatttcacattttgttgctgagttgcaggaattttttatggattctgaatattaaccttttatctgatattttatttgtaaatattttatcccattttataagttgccttttcagtctttggatcatgtcctttgatacataagtttttaagtatgatgtacttccatttgtccatttttgttttgatttcctatgcttttggtgacatatccaagaaatcattgtcaagttcaatgtcatgaaactttcccccagtgttttttttaggaattttataattttgggtcgttaggtctttgatccattttgaattaatttttgtatatggtgtaagataagggtccagttttattcttcttcatgtggttattcagtttccctaatgccatttgttgaggagactgtcctttcctcattgagtggtcttggcacccctggcaaatatcgtttaaccatatatgtaacagtttatttcttggctttctattgtgttacattggtatatttttctgtctttatgccagtactacagtgtttttatcactgtaacctatattaaggtttgaaatcaggaactgtgaagcttccaaatttgttgttcttctcgaaaatggctttgactattcagggtcccttgagattccacatgaattttaggaagaatttttctatttctgcaaaaactactgttgggatttttataaggattgcattgaatctgtagattgctttgagtagtagtggcttcttaacaatattaagtcttccagtctatgaacacaagatgtgtttccatttatttgtgttttcattattttctttcagccatgtttggtatttttcagtgcacatgtcttgtgcctccttggttaggtttatccttaagtattttattattgttgatgctattgtaaatggaattgtttctttaatttcctttttcagattattcattgttaattgcttggtgatttttttaaagtttagtttataattatgtaactttggaggttgataatgagaaaatcacagaatatttctatgcagaatattattaaatttatcaattttgggaataataatggcacataatgaggctttactttgttccaggcattaagtgtttatcataaactcatttaatttataacaaccctataaagtgtgcactattactattctcatttaacagatgagaaaattaatgcatagagaaattaaataactttttcaagattacacatccaggaagctttagatgcaggaatagaaaaataaaaacatattatgtttagccagataaaataaattagcttataataatttgacacttactcctttgactgggtcttgggaatactaataccacttagtattgctccacttctgatgtaacagatgtaagagaaaaagatcagctaagatctggctcttgttctcatgaacagacatgcagtatgaatagaagaaacgttgaataccagccatggaataggactatttaaaagcatatttcatttcagatgatgctatgagactcagcttaacttgctcattatttcctttataagaagtcaggtaatataaactgggttgggcagtggggggagtgagacactgttgcagcatcaaccaaggcctgctacaagaggttttatacctttaatcagtcatattttatctgaagaaggactctcaggctgtgagaatttctccttggattcagaaatgagaaaatgggggatgggtaatttttgctattttcttttctttttgttccctatacccaaataaatgggccttttcaatttttaaatccctggttaagcatatttttactgttataaatgcatggagatatgcttcattcaatcagaatgccctgcctggtggaatagacagaatagaaatggaatgactaaaaattactgaaagtagtctagaacatcttgcaacagcaaatgaattacttgttacaaatattatagagaggatttaagcactgattagagagtaggaatagataaggttcttgtcaactctaagaaaatataattaaatacattcatagaagagagacggtttgggcacacccaccactgtcccttctggtgcatgcatcaggcagacctgcagtcacacacatgtgctcagacccaccactgccccactgacatgcacatgtgtgaggacccctgccaccctactgatgcacatgtgcaagggggctcaccactgtcctgccagagctcttttgccaacagactccatcagactgttgttgctgcaggactgggaaaccctggccccaccagtgcagctggtgcttaacctcaaggaagcagagaaaaaagctgtaggccaggtcccagtccctcagggtaagagtatgcagtccaaaagtgctgagctaagccttggctccatgaaagtatctagaaatgaagccaatagactaaaaccaaattataccacattcaaaccctcaagagtatggaagaatatacaaataaaaagccacatccaaaacacagcaactttgaagattaaagaaacatcaggccacacagatgatagagaaccagtgctagaactctggcaactctaaaaaccgagtgtcttcttacctccaaatgactacactagctctccagcaatggttcttaaccagactgaaatgacagacatacagtacagaatctggatggcaaagaagctcatcaagatagaggagaaggttgaaacccattctaaggaacacagtaaaatggtccaagagttgaaagatgatgtagctattttaagaaagaaccaaacaattttaggaagtaaagaactcactacagaaattttagaatgcaattggaagcactaataataaaatagaccaagccgaggaaaaaatctcagagctcaaaggctgcttcttcaaatcaatgcagtcagaataaaaaaagaataaaaatgaatgaaacctccaagaaatatgggattatgtaaagagaccaaacctatgacatattgcattcttgaaagagatgaagacagagcaagcaacttggaaaacatatttcaggatacggtgcatgaaattttttccaacttcattggagagattgaaatgcaaatttaggaaaatgcaaaaaaaaaaactttgcaaattactataggagatgaccattcctaagacacatagtcatcagatgctccagttaacatgaaagaaaaaaatcacaaacgcaactagaaagaaggggcaggtcatgtacaaagggaaccccattaagctaacttaagtgagtctttcagcagagacttgcaagccagaagacattggaggcctataagcatcactaaagaaaagaaatttctaccaagaatctcatatcctgccaaactaagcttcataagtggagaaataagattcttttcatacaagcaagtgataggagaattcagtaccacaaaacttgcctctgaagaagtccttggctgggtgcagtggctcacgcctgtaatcccagcattttgggaggctgaggtgggtggatcacctgaggtcaggagttcaaaaccagcctgaccaacatggagaaaccccgtctctactaaaaatacaaaattagccaggtgtggtggtgcacgcctataatctcagctactcgggaggcagaggcaggaaaatcacgtgatcacaggggcagaggttgcggtgagccaagagcatgccatttcactcctgcctgggcaacaagagtgaaactctgtcaaaaaaagaaaaggaagaagaaaaggaagaggaagaggagaaggaggaggaaagaaggaggaggaggaggagaagaaggagaaggagaaaagaagaaggagaaggagaaaagaagaagaaggagaaggagaaggagaagaagaagaagaaagaagaagctcttaagggagtgctaaatgtggaaatggaataccagtatgtggcaccacaaaaacacacttaagtacatatcccaatgacactgtagaggaactatgcaatcaagtctacataacaaccaactaacaacatgataacaggaccaatttctcacatatcagactaaccttgaaattacagtggcttaatgcccaacttaaaaggcacagagtatcaagccggataaagaagctagacacaactgtatgctgtcttcaagagacccatctcatatgaaatgacacccataggttcaatgtaagggaatggagataggtttatcaggaaaacagaaagcaaaagagagtaggggttgttattcttatttcagaccaaatagactttaaaccaatgattaaaaaaaaagaaaagcaatacatgatgataaaggttcaattcattcaattcaacaagacttaacaattctaaatatggcccactctccctccactctgtcctgtggctgcccactgccctcctactgtccagcgtggccctgctgcactccagccatgtcctctccaggatccccactgccttccacccaggcctcaccaccacagcctctgccagaggtcctggtggacctatgtggagatgggacttccagatcccatcctgggagtcaccaaagcctttaagagggacaccgatagcaaaaagatgaatctgggagtttgtgtctactgggatgataatggaaagccttacatgctgcttaatgtcaacaaggaagaggcccagattgccacaaaaaatttggacaaagaatacctgcccattgggggtctggctgaattttgcacggcatctgcagaactagccctgggtgagaatagtgaagtgttgaaaaatgtccagttattcactgtgcataccatttctggaactgcgaccttaacgatcagagcctgttttctgcaaagattttttaagctcagccaggatgtccaaaccatcctggggaaatcacacacccatcttcagggatgctggcatgcagctacaaatttattgttactatgaccccaagacttggtgtttgacttcacaggtcgtatggaggacatttcaaaaataccagagcaaagtgtttttctgcatgcctgtgcccataatcccatgggagtggaacctcgtctagagcagtgaaaagaaatagcaacagtggtgaagaaaaataatctctttgcattctttgacatggcctagcaagggtttgctagtgatgattgtaacaaggatgcctgggctgtgcaccacttcatcaaagagcattaatttttgtctctaccaatcataagccaagaacatggagttatctggcaagtgtgtgggagccttcactgtggtttgcaaagatacagatgaagccaaaaatgtagagtcagcagttgaagatcttgatctgtcccatgtattataatcctcccctcaatggagcccagattgcttctaccattcttaacaccgaaatttgcaaaaacaatggttgcaagaagtgaaaagcatggccaaccacatcattarcatgcagactcagctggtctccaacctaaagaaggagggttctacccacatctggcaacacataactgacaaaattggcatgttttgtttcacagggctaaagcctgatcaggtggagcarctgaccaatgagttctccatctacatggtagaagatggccacatctctgtggcaggggtcaccttcagcaacatgggctaccttgcccatgcctttcatcaggtcaccaagtaatatcactggtgcaaggaaacagaaacaacctttctgtcttcagtctctgctattgggagcttcacaaagaggatgacagaaggtggatggtggtgagtagatcatttctttcagctgcattgtgtaacaacattcagcaattgaatgtttctcagaaaagaacatgtagtgacatagggcagagacatccatgtttggtgtctggaacattgtggctctaaaccaaactctcccctgtccttttatctcccaacttttctcaaagagtttatacatgcaagaaagtcatcacaccaaaaaacctgtcagttatgccattgcaatatttcagaagctttaactgaagtgtaatacagtgtcagggttcctcatgagaaatagcacacattggaagctttgagagaagacctacttctatcatgaacagtcagcactgtgtctgtcctcccatgatggagcaaccttaaaaagagaccatattgcagaaattgcattttatgaaaaccaatcagtatgctgacattacagcaaggaaaataaaagatgttgttttctgtcttatttaagaaaaagagaaggctctctcttctcccttgtcattgttgtttttttccttatgcacaaagatttttaactaatgtagattttcattccattctactgcttgattgatcatcaaccccatcctgttgggatttatttaaaaataaagaacataattttctgctgatgccttaccatcacctttctcagcaaagaatagtggagagtaggtaactgcactttatctcagcatcctcttcaaggattgtatatttgtcttctgttgagatgttgtctctgcccagttggacctactctctttgttgaatgtagttgtgcagtcactcatttcacatcatgagttaggtggcacagggcagtaccaggaaataggatattctaggctttatgtgctgccagctgggatcaagctacaccctttggaaagaatcactatctgctctaatcatgtagacttattgcagcctggcttctctgttacaataaaattactgaagacactccccctctgaaaataaaaaaaaatcatttctaaatatatattcattcaacactggagcacccagatacataaaacaagttcttggacacatatgaagagatcaagataaccacacaattatagtgaaaggcttcaacacaccacaaacagtgttaaacatatcataaaggcagaaaacgaacaaagatatttgggatgtaaactggatacctgttcaaatgtacctaacaggcatttacaggatactccacccaataacagagtatatattcgtgtcatctgcacatgacacatactctaatatcaaccatgcacttggccataaggcaattctcaacaatttttttaaaaaaagccaaaattattccatctacacttttggagcataatgcaacaaaaatagaaatcaatacaaagaagatctctcaaaactcataaaattacatggaaattaaacagcctgctctctaatgacctgcctcgaatgtaaatgaggcagaaatcaagaaattatttgaaactaatgaaaccagggatacaacataccataatttctgggacacctctgaaacagagttaagaggaaagtttatagcactaaacacccacatcgagaacttagatctaaagttaacaacctaccatcacacctagaggaactagagaaaaaaagagcaaaccaacctcaaaagtagccaaagaaaaataacaaaaatcattgctaaattgaatgaaattgagatgcaaaaattcatacaggttcacacctgtattcccagcactttgggaggccaagacaggtggatcacttgagcccaggggtttgattccagcctgagcaacatggtgaaacttcacctgtataaaaaaatgcaaaaattaaccaaatgtgatggtgagtgcctgtagtttgagctacttgggaggctgaagtggaagaattggtggagcctgggaggtgaaggttgcagtgagccaagattgtgccactgcactccagcctgggtgacagagtgagaccctatctcacacacacacaaaatctatacaaaacatcaatgaaatcaaaagttggtttcttgaaagaataaataagattgatagactgctagatagacaaatgaataacagaggaaagatccacatgaacacaatcagaaatgacaaagatgacattaccacaaccccacagaaatacataaaaactaccagagactattacaaacacttctatgtacacaaattagaaaacctagaacatattcgtgaattcctggaaatacacaacttttcaagattgaaccaagaagaaactgacaccctgaacagaccaataaagacttcccaaattgaatccctaataaaaaatacctatcaaccagaaaaagccttccactggaaggattcacagctaaattctaccagacatatttaaaagacctggtaccaatcctactgaaactattccaaaaaattgaggaggacttcttcctaattcattctatgaggccagaatctttctgataccaaaacctggcacagcaacaatgaaagagaactccaggccaatatccctgattaacacagacacaaaaatcctcaacaaaatcaaattaaccagcacatcagaaagctggtctaccatgatcaggtaggctttattcctggcatgcaaacttggatcaacatatacaaatctatacatgtgatcatcacataaacagaactacaaaaacacatggtgatgacaatagttgaagaaaaggctttcaatgaaattcagtattccttcgtgttaagaaccctcaacagactaggcatggaagaaacatacctcaaagtaacaagagccatctctgacaaacccacagccaacatcatactgaatgggcaattgctggaccccttccccctaagaattggagtaaaacaagaatgcccactctcaccacttctattcaccataatactggaagtgctaacctgaacaatcaggcaagggaaagaaataaatggactctaaataggaagagaggaagtcaaactatttctcttcacagatgatataattctatagctagaaaacatcatagtctctgcacaaaggctgttagaccttactaacaacttcagtaatgtttcaggatacaaaatcaatgtacaaaaattaataggatttctatacacaaataatgttcaagctgagagccaagtcaagaactcaatcgcattcacaatacccacaaaagaataaaatacctaagagtagagataaccagggaggtgaaacgtctttacaattagaattgcaaaacactgcctattttggacctactctggctcagagggcagcccactgatacgaagtttgtgtctcgggcctggcagcattcaccacaagctgattgaagaacatttgggccttaagtgaatatcaatgttagcctacagcactccccatgggctattggtggtggtggcatgtggagagacttgtctgactgtggaagaaggaggcaagagtgtgaaggacattgtcttgtggcttgagtgccagcttagctgcagtagaaaacagtaccagttagatctctaaggtttttgactccagtccctggttcccagatggcatgtctggacttggcccagacctggagaaactcacctgtctggcttcaccatctgctaattgtggagccctagggcattaggaaaacataagcattagctaggtagtggttatggaggccttgggtgagaccaagtgctttgctggcttcaggtctgtcccagcacagacgcaatgatggtagctacatgggtgcatgtgtcattcctctaccagtccaagacagttgtccatggagagagagactctatttggaagaaaacaagggaacagaacaagagtttctgtcaggtaatccagataattcttccacaacttatctaggatcagaaaggcattacctctatgagtctgcaagaactactgcattactggacctggggtgcccactaatgcagatatgtctgcagtgaccaaaaacttagatcacactaccaaagtccatttagatacctggcaagtcttcccaagaggtattggtacaaagaagcccagactgcaaagactgcaataaatactcaactcttcaatttgcagtcactgatgaacatccacatgcaaaaagaccatccgggaaaacatgccctcaccaaacgtgctaaagaaggcaccagggacaaatcctggagaaacaaagatatgtgaccgttcagacagagaattcaaaataactgtgttaaggagactcaatgaaattcaagataacacaaagaaaatattcagaattctatccgataaatttaacagagattaatgaaaaacaatcaagaaaaaaattagagttcaaaaatgcagttgacatactgaagaatgcatcagagtctcttaatagcagaattgatcaagcagaaagaagaattagtgagcttgaagaaaggctattggaaaatacacagtcagagggacaagaataaaaataaagaagaacacctacaagacctggaaattagcctcagatgagaaaatctaaaagttattggccttaaaggggaggtagacaagatgtggatagagagtttattcaaaggggtaattacaaagcacttcccaaacctaaggaaagatattaatatccaagtacaagaaggttacagaacacaaagcagatttaaccaacaattgtctcaaagcatttaataatcaaactctcaaagttcaagaataaaaaaaggattctaaaagcagcaagagaaaagaaacaaataatatacagtaaagctccaatacctctggaagcagacttttcagtgaaaatcttacaggacaggaaagagtggcatgtatttaaagtgctacaggaaaaaaaaaaaaactttagaatactgtagccagtgaaaatatacttcacacatgaaggagatataaagactgtcctaaagtagcaaaagctgagggatttcaccaacaccagacccatcctacaagaaatgatagagagaattctgctatcagaaaggaaaggacattcatgagcattaagaaataatctgaaggtacaaaactcacgggtaatagtaagtccatagaaaaacacataatattataacattataattgtagtttgtaaactacacttaccttaaatagaaagacaaacagatgaaccaataaaaaataataactaagacaacttttcaagacatagacagtacaataagatataaatggaaacaaacccacaaattttaaaagtggggagatgaagttacagtgtagagtttttattagttttcttattgcttgtctgttcatgcaatcagtgttaagttgtcagcagtttaaaataatggattttaagatagtatttgcaagccttatggtaacctcaaatcaagaaacatacaatagatacacaaaaagtgagaagcaagaaattaaaacagaccttccagatggaaaatcagcaaagaaacattgggcttaatctacactatagaccaaatgtgtctaatggatatttacaagagaatcactttcactaaaaggaagacatgaaggaaggaaaaaaggaattgaagatcacaaaacaaccaggaatcaaataaaaaatggcaggaggaaggacttacttattaatagtaacattgactgtaaatggtctagacattgcaatcagaagacatcaagtggctgaatggatttaaaaaaatgcaataatttgtttcctacaagaaatatacttctcctagaaagacacacgtagactgaaataaatggatgaaaaagattaatatcttggcagtggaaaccaaaaaatgcaggagtagttataccagtgaaaatagatttttaaggtgaaaagtataagaagagacaaagaaggttatatgatttgtctgtgtccccactcaaatctcaccttgaattgtaataatccccacatgtcatgggagggacccagtgggaagtaattgaattatgggggtgggttttttccatgctgttcttgtgatagtgaatgagtctcacgagatctgatggttttataaaagggcagttcctctgcacatgctttcttgcctgctgtgatgtaagatgttgtgtgcttccccttcatcttctgccatgattgtgaggcctccccagctatgtggaactgtgattcaattaaacctctttcctttataaattatctagtctcagatacatctttattaggagcatgaaaacagactgatacagaaggtcattatgtaatgataaggtggtcaattcagcaggaggttataacaattgtaaatatatatgcacccaacactgttgcaatcagctatataaagcaaatataattagagctaaagagagagagatgccaatacaataataactagagacaccaacatctcactttcaccattggacagaccttctagatagaaaaattaacaaaggaacattggacttaatctggactatagaccaaatggatctaatagatatttacagaacattcaattgaatggctgcaggatatacattcttctccttagcacatggttcagtctcatggataggccatatgttaggctacaaatgtgtcttaaaacatttaaaaattgagataatatcaagaatcttctgtgatcacaatggaataaaaccagaaatcaaaaacagaacaattttggaaattatacaggcacatggaaattaaacaatatgctcctgaatgaccagtgggtcaaagatgaaattaagaaagaaattgaaaatttttttgaaacaagtgaaaatggaatcatgacatatctaaacctacaggatgcagtgagagcagtcctaataggggagtttataactataagccactatgtgaaaaaaagaaatacttcaaataaacaatttaatgatgcatcttgaagaactagg

SEQ ID NO: 94001 - DNA, 42879 bp, Homo sapiens
actcaccatgaaggtctagaagcccaggttaaaatgcgggctctacagcaggttttgagtgtgggtgaaagtgtcaatttgctcagtatgtatgttgataaagttagaatatccagctaacagagcaaggttctgctgttttggaaacaatggctgagcatataagtatgtgcaagtgaactaaaaaaatagttgtaactttgaagcctttttatggatcaacatgaagattgagggacctcaaacagaaagggcatcctggtggcaaaggttaatcattaccagactgcaagagtactttcaatggcaagaaagcagcaacagaatcaatgaaaacaaagtaaaaattagaataccctttccccttctccttctgacttgtagacactgattgtcttccttggacttagggaaccccttaggttcttgaaaaattcaatgatcaggctatagtagatggtccgcagtacacagcacaagattttttgataaactggacattttgagacccaaataactaattagaaaaatcaaacatgtgaaactactttatcctatgcataggggttatactggaaataaaatgtacaacattggaatccctaaggagaaaagtcctaaaagtttcaatatcaagaatcctgcacctgctgctacttatctagccttttgcttgatttctggctgatgaagttgcacaactctcgaaaacttaaaaacttgaaaatttgtcacttgaaaactacttgaaccaaactatgaaatctcacctgatatataagatgcaattgttacaattattttaaacttcaatttagtgttcactagcctttttatgtaaagacttacactgaattcccagcctcagaggcataatcttctgcagtctttccacacacatctcgagaaaacatatcaatatttgctgcagaagaagaatgactatatctttgtgttcacgaataacagcaagtgtgagggccgatctaaaataacagagaggtaattaaaaactttaatgacattttaaaagctaagtttatatactttatcaacttaatatgttgtctgtccatgtagaattaacccaattacatgtactaagaaacaagcatcttgggtgctcaagggtttatctttgcaagttaccacaaaggttaaaagcaaggaacaaaaaggaagcctcttgtcccactgtggtatgacataaagttgctaacttaaagtcttttgatgggcaagaaactatgctcaggccacctatctacagtaggcaaatttaagtgaaaaattattcatttcttccctagtctgatactatacattataatgcaaaatcaactaaagggtcagataatagctatctgcaggcttaaaacaataatattaataggaatgctaatagtagtagtcgtagcttcagttaatgatgctcataagcatgtgctaggcatttaattaaacactatatataaatatatgtatatggaggataataatatatccttcaagggtgtttgtgtataagtaacataagtaacatcatatatatataaaatataaatattgtatattatatattatctacaaaatatataatatacattatagattattatctataaaatatatattgtatatattatatatgatgttacttacattatcttcttacatacatatgtgtgggtatatatatattatatatatgcacatacttatatgctcagccattgtttccaaaacatcagcaccttgctctgtaagctggacattctaacattatatatatatatatatatatatatatatatatatatatatatatataatgttacttacacacaaccacccttgaaggatatattattaccctccttttcacagaagaaaacatacttggtgataagtaatgttaccaaggtcacacatctagcaagtgggaaaactagggattaaatccagtcctgtgtgaacctaaagcttgttttcattaaagtaaagttttatccatttaaagctatcttttctccctctccccatatcaattaaaaacaacaccaaaacacagtagaaatgaaaaacatgaaacctctttagctaacataagatcatacaatcaaaagcatcacattattacattataaataacaccacatcatattacaaataacaaacatctatcaatatacaaagctttctatatatagaagccttttatgtgtataatgtctatatagagagacaaatcctgctatatactgttctttatgttactcagtccaaataattgtttttctacctgtgatgatctgtgttgatatttctcactatatcccaataattaaaagttagtcttcttattaatataatatttgtgacttgagtgaccgctaccactctacaatgacactcaggtttaaaaacaacacaataagaactaaggtctgtacctgttaagacaattaactgcatttatatttgcatttttctttaataaaaattccaccattatcagttttcctagatgtgcagccagtaaaagtggttgacattcaatctgtaaaacaacagcaacaatttataatcacataattacatatttatcaactgaactgaaaaccttatgtaagatcctgtgagcttaaatatatacaattgaaaggacgtaagaggtagtccctttcttttcactcctcggtgcttttctacgttctgctccttccgctggaaacagcctcctctgcctcaccacaagaactctggtcatctccaaaactcacttcaaacatttcccagttccaagaatctttgcttctgtcacagcatttagcatggcatgtttcaaggattttattgtttcccacctgaaccaagagcttcttgagggcagcagctgtattttttttctctatgtcctcaaactctaagacacagtaataaatgtttcaggtatttttataaatgatctaaattattatctatagagcggtgtttcttaaactattaatatattccaaaggatatttactttaccagaagctcaacattataccccaaaagaaagacttcatgatcacccatgtttgaaaaatgttacaaaactgtgcattttgtgtctagtatttgagaaatctttttaacttcacctaatccctatttgtaaatacttattttggagaacgttaacatttgagaaatgagagtttcacggatacagttgtgagagcttaccagtaaaggtggaggtttcctctgggtgatacacacttgcctcattctcttctaaccatggtgtcagaatctcagatgacaacgtcaggtgcaagcacctaatgttgtcgtctcagattctgacacgattgacagttcatttgaagcctatctctttttaatttggagagccaggctctgaattaatagagataggcttcaaatgaactttcactgcttattattaaatagtccatgggttttctctagtaatatttttatcttagctgtcagaaagctctgtatgaaatgttattctcaattacaatcttaggaccctgatgcaaatatttatgtaattataatcttaggaccctggtacataattccttaaaaaaattatttgtattctagtttccatattaattcttacttaacttttttattttaggtaaaatataaatcagaaataaaaatacagtggcttatcaattaaacctctaataatgacctatatgaattatttatagcataatgaaagccactaaattatttgcatcattcatctatctatctatctatctatctatctatctatctatctatctatctgagacggagtctgcactccagcctcagcaaaagaatgagactctgtctcaaaaaataataatagtaataataataatttttaaaataaagaaaaaagtattcatgactcttgttaaagacaggtaggaagaccttattccaggggggctaccacaatggggttttgctgtaggagagcgagattgggctcagtctcactctacaaaggatgagtaggatgtacagtccaggagcaagggtgccgggtgggtggaaaatgacaaagaggagacattgaggagaggggatgcttgctcggccaactcagcaggaatcttcctgaaagcaggccagggtaacaagatatcgagagtggaggatgaggaatttgatcaaatattgagggtgatcccataggattttcactaaactgacccagcaggactcttgttaaacctgaactaaacaagccgaggacagagcctaaggtcagcgccttgaaggcttagtggagtagagttaggtctaggagagggtcagtcacctgacagccatctgatcataagaaccaagtagcttttctatcttttgtccaataacctttctctaagcactgtaccccaaggaaagaaggcaaatattaaaaatcaaagaaagaaaaggaaaaagtcagtggtgtcaagatactcacagctgcactatttttgtttgtttgttttgttctgttctgtttttttgagacagagtctcgctctgttgcccaggctagagtgcagtagtgtgcactcgcctcactgcaatctccacctcccaggttcaagcaattcccatgcttcagcctcccaagtagctgggattacaggtgcgcaccaccatgcccagctaatttttgtatttttcgtagaaatgggtttttgccacattggccaggctgaactgcaccattttttaaataaaatgttgtcaatagccccaaagcctgacaatagaatcccaagtgaacaaaggctggtaaattgctgcctcttgaagcagctgaagctgaacgctggggcttgggagccagaacgcttgggttccagctcagctcctccagtcaccaagtgactttaacatctctctgcctcagtttctaacctgtaaactaaggattgtactaactcctacctcaagaactacctccaagcttcagtgagattgtggctattgcccagtgcccacggactgtgggaaatgtcctgtagccatgagctacaatcaaccactgcacaccctttccatccaagcgctctatgagatcggggagaaaatggaaacctatatggggtgacccaaggagctccccagcaaagcgggattgaagtacagagccaaaaaccagaggagagttacccaagcatggctgggatgtcctgagaggagcaggagcagacctttcatgccatctccagaccaggcccaggcaggtaagagggtgaacaggaccaggaattcgcacgaccccggggggccgacaggagaacctgcagaaccatggaccccagacctgcaagacaccaagatctgcgccggccccaagcacaccccaaatgcacctcaacaggggcctggccaggcccctggaccactgcctcggctcctcactcaggccctgcctccctggcggccctctcgagccctaccccacagccagctcctgcttaaacctagcaatgccccccaggcctgcaattctattatcagcttgaactaggtcccgctgagagtgacaggaaacccaaataatggaaattgcaaccaggcagagtgtgttgaattctccccgggaggatgcagcctggagctgagctacacaggacgctgggaagcaggccccttctgcgcaccatggccatccccagggagcccctcatcaggcggcttagggtggcttgccagccagaggcatcagatggaggaaaaatcagaaaagaagagaagcaacgctagcttctggcaagaggctgggactggtaggtgacattctccttttgccccagtggccaaaatgtggtcacgtggccatgctttactgcaaggaaygctgggaaatgtagtctttcttctttgcagccgtcttatcatggaaacaggggagaacggatagtaggggacaactaaccagctctgccacagctgaaaatccagattccgccatggcctacaggctcctcctggccgaccccctcgggagcccgggtgcctcccttcctccatgcctggtccctctgcctgaagccttcctgccctctctcctggctccaagcatcctgtgggcttcccccagcgctggtgccagcaaagcccgatctcctctctcgaggycgcctgcactccccctgtgcgtgcatcgcaacctctgtccctgacacacagggatccttaccctccccagggtctgtgctccccagggaggagccgcacctctgggcgccctgagccccagccctgcagggyaggcaccccatgcggtggttgcaggcacccggcagtcgctccatcctggttttcrgcctttagtgcacagaagcgtgaagaagcggkggtcactggcacggagtcctccttgagagtccggccggggatccgtaccagtggtccctgcccacctgggttaggaaaggctgactggcctggggaggctgtggacgacgtctgcggtgtcatstgagtgccacggccatcactttgagacggcgtctgcttgctgcagccaggcaaaggtcttaaggaaggccaaggccactgtcgacaggtgtgtggctccagattgaaattgtgacaatacccccagccatgcccttccatcttcccaccgtgcaatcagtgcaccacctcccaccatgcaatccagagcaccacctctcagcaaaacctccaggatccacctcaaacccagccccatcccacagccatcaccctggtccgggccaccaatagctcttgctcggacacaggcagtcacctctccagggagcacccagtgtcccttctgccctcgttctggtccgtccttcacccacaaatggagagtgtattttagcattagatcagttcatgtcgctctctcgcttaaaacccgcccctggcttccactgcctggcatgagaatcaccactgcctgccccacgggactggccctgccacctgccccatgcccgctcccctagctcatggtcccccagagtcactggcctccaccatcctctcagccaaaccccaccagccaccactgcgtgccacccacccaccccgccagcctctccatcacgtattcctccttcccttcttttgggaaactcttttcttcttgtttgttcattttattttctgtgtccccaactcgaatggaggccacgcrgaacactgtctgtctcattcacttctgtgtcccyggaacctagaaccatgcctggcacacagaacgtgcttgataggtactgagacagagacatacagagaaggaaagagggagagagacagagaaagagagagaaaataagagaaggggaaggagagatggcggagagggagggagaaccgaacrctgaatccaggggttcctctcccacccctcatgtgcccatggtaacaagggagtccccctcttctgaccccttgttgtcaaaaagtccatcaagcaagaacgcccgagccccaggccccctctgaaattcccaagaaggaagcaccccaagaaggaaggcgcgcaggacgctgctctggagccatcgggttcccrgtctgctcaccacrctcaaggagccccttaacaggagcaggaggagaaaagacacccagcctggggttcccccmggacaaggccatgctgtracccaggcttggtcctggccctgaccgtgggaagcccaccccacaggccctcrcccaggcaggcctgaggcccatgcaccgctaaaggcctggagagggggtcccaccgcagcctcacctgggtcccctggggtcagggtaagctgggacaaagggaccaccggttgctatgggagagggagaaggcacaactttcccggtagaatgggctcctgctgtgctctgagccctgggtcactgtccgcactctggggagggaggagaggagcctggagccccaagggcgcggctggcaataaaggcagatgctcaagttgatgccgtcccacgcacttgaggctgggtccaggggtggcactgacacggctggggagcccactccggaggtatgacccggggatgtgcacagccacattccaaagacacacgggatgagatcagcccaggtgaccctgggactttgccctcttcggcaggagccagccctgtgcaccctgtgtgcctgtccatctggaaggcccagcatgagaggcccgaccgtcctcctcactgtggctctgcccacgctcctggctcccagggccggggcaccggtacaaagtcagggctcccggaacaagctgctcctggtgtccttcgacagcttccgctggaactacgagcaggacgtggacacccccaacctggacgccatggcccgagatggggtgaaggcacgctacatgacccccgcctttgtcaccatgaccagcccctgccacttcaccctggtcaccggtgagtactgccccaggatggggcctgggggtgggagggcctgagaaaataggtggcacagagccctgtcgtgcaggaaaaaggggagaggtccttgctccatgcacaggacacagccaaggggaacattaggaatacctcaccgttggtagcaacagatctgggacaaagaaaaatgaccaggggggtccttaaacccgtggccacaggcagggcagcaaccccaaaaggcttcaggaggaggggagtgtggcaggctcccagccggctcccacggctcccctcycctgccygcccktccagctggctgtgtcagcctctccctctcccttgcatcgtttccatctcccagccaagacctccctgacagatctgcccaggctgtagacaatacagacaggtttttaaaaagccaaatatggggccaggcgcagtggcccacgcctgtaatcccagcactttgagagggtgaggcgggcagaccactggaggtcaggagttcgagaccagcctggccaacatggcgaaaccccgtctctataaaaacacaaacattagccaggcatgctggcgcatgcctgtaatcccagctacacaggagaattgcatgaacccaggaggtggaagttgcagtgagctgacatcgcgccactgcactccagcctgggtgacaaagcaagactgcatataaaatatatatgtctatacatatatttttgctcccgcagccgcggctttttgccgccgctttctgccgccgcccctttttgccgcagctttctgccgccgccgccgccgccgccgctttctgccgccgccgccttttgccgccgccrctttttgccgccgccgccttttgccgccgccactttttgccgccgtcgccgccgccgcggctttttgcctccgtccccgccgccgccgcttttgccgccgcccccgccgcggttttttgcccccgccgccgcggctttttgcggcttgttgcccccgccgccgcggctttttgcccccgccgccgctgttttttgccggcgcggctttttgcccccgccgccgcggctttttgcccctgccgccgtggctttttgtggcttttgcccccgcggctttttgcccccgccgccgcgggtttttgccgtcgcggctctttgcccccgccgccacagctctttgcccccgacgccgcgcctttttgcccccgacgccgcagctttttgcccgccgcggctctgagggcgggagcggcacactcggctgccagctctaccggcgtcctggctcgggcagcgctgaggggcgctcctggtccagctctcccggatcgggggtcccttgcctacgcgccggcgccccgggctccccgccttggccgctgcggcgctccgcgcggccgcgatgtgagagaagaaggagggcggtggcgggggtgatgcggcggccgcggtgggaggcgcaggggcggcggccagccgggcgctgcagcagtgcgggcagctccagaacctcatcggcagcctgcgcgggctgcgcaccaagtgcgctgtgtccaacgacctcacccagcaggagatacggaccctggaggtaaggggtgtgtggaccccggctgggctcgaggagcggcccggacacctccctccgggccctagttcacttctggtggagttgcatccttgagctcgagtcgcccggttggaggcttctccctcctgcactcgctgatgcggcagccggaggaccccggtccagccctcaccttgggcaggatttctggggcgggtgcgtggtgggaactgggatagaggctcgaggggcccatgggtggggtgggctgcgcgcggacatccccttaccccctcccccccgaatttccatctggtccagccctctcatcttgtaggtgaggaaaccgaaggcctgagggagaactgacttgccaggaacccctgttaaggagaattaacaaagagtggttaytaaaggagaastgagttgggagtcagacctggaggcccacacgcttggttaagacattataccaccttgaatctggcatgctgactgagggtgagccactccatcctcgtctgattgtggggtcttgacctcaaggggtttcttgcaggaaaaagcaaataggcttgctttcctagctctgtccagtaccttagggaccctgaggaccggagagattcttggagagccatctggtgtatgtcatgggtgggccttttttgaaggtcagtctgcccagtgggctggctcagcccgaatgaactgtcttgaatctttggagttgtctgtgtacttttaagggcttctcatccttgcaccaaaagatcccctggaaattaggtgggaaaaccttaacttttgtggggccttgtgtttgtcttaaaagttcctgcacatggccaggtggagtggctcacacctgttatcttgtcctggatcccttgagtcaaggagtttgagaacaacctggacaatatagtgagaccccgtctctacaaaaaataaaatattatccaggggtggttgtgcgcatctgtagttcwaggtactactgtggctgaggygggaggagcacttgagcctgcactgagctgtgatctcaccagtgtactccagtctgggccacagagcaagaccttgacgcaaaaaaaaaaaaccaacaagaaaaattcttgaagattttgcattctgtctcactatccattggttttcatgtctagataatgtcagaaattctttacaattgcttccagaaggagtagccttttgatctagtgcacaggtgtccagtcttttggcttctcagggccacattggaagaagaatgctcctaggccgcacataaaatacactaatgctaacgatagctgatgagcttaaaaaaaaaaaaaaggtttgtgcataattttcatgatacccaccaccacagataggtggaaaagtccttgtagtcaaagggttggacacagctgatctagtgtcttgtcgtccattttggctttctccctgattccagaatgcaggtagagatgtagagacatgctttcaggacagctattgagataaaaaattcgttgtcatttattcccaagcacagctgtttgtcattttcattgaaaaagtctccatttaaactgctgtcacatataaaatcyayttatataagtctgtatttttctgttgtcttggcctttgtgggcagtagtgtgttttaaccgagcaaactgtccttccaaataatgaagctgaagtcagcctacctgcttgccatttttcttccccttccatttttctaaccycaggataattgtaagaatgaattaagatttgtgtttaaggccgggcacagtgtctcaggcctgtaatctcagyactttgggaggcagagacagmtgtatcscttgagctcaggagttgaagaccagcctgggcaacatactgagactctgtcttgtataattaaattaaaatttaataaaagaagaggaaaagacctgtgtttcaaatttaaaaaaaggggggaaagtgtaatgcaaamtgtggactatgccagctatgattgggaaaaataatttttcctacagcattatctgtagacttgtattagcagcatactggtcataagcattttgctttcctcaaatatgatgaggtaagctactttaaagtgtggtggggctttcttctgcrtggctcctggaggtgttgagtcccaatttagccaattaatttgggtttagttttgatatggataagggagaccaacttcgttcatggtgcacacacagttttgccaataaggagaaaaaaaagccacctgaatgttcctactcattagatgctatctggagagctcctaccccacccccaccaaggcccgggcccttaaaaagactcaatgcagcctttctgtatctcatactgtattctgcaagatgctcctgtgaaagaaagttgtgctgcatcagcygtctcccttctgaagatccctgcggatgaggatttgtgttttaaaggttctgagaagtcctgcaacaacagttctcaaacttatttgtccaggggatcttttcttccactgaacgtagttggggagacatggccttaagccttgagcagagaaagagacaagaaactgttgcctcacttacaaccaagtgttgtgtttatgttttaggtttttatgaaactgaggtgctgtttgaggttctaaatcaaattgggtggttgaagagaggctggtatccctgtagacttagccagccatgagaggttgccttttgttgaaggaggtgttttacaaggaaatagggtgtctcctgggcatcgcattagcacttaaatacatgtatcactgaaatgaaatgaaatgatgaaatgatgaaatgaaattaaatgatgaaatgaagaaatgaaatgaaatgatgaaatggaatgaaatgaggaaatgaaatgaagtgaaatgatgaaatgatgaaatgaaatgatgaaatgatgaaatggtgaaatgaagaaatgatatgaaatgatggaatgaaatgaagtgaaatgatgaaatgaggaaatgaaatgatgaattgaaatgatgaaatgaatgacgagatgaaaagatgaaatgaaataatgaaatgaggacatgaaaaggtgaaatgaattgatgagatgaaatgaaatcatgagatgaaatgagatgaaatgaaatgatgagatgaaatgaaatcgagatgaaatgatgaaatgatgagatgaagtgaaatgatgaaatgatgagatgaagtgaaatgatgaaatgatgagatgaaatgatgaaatgaaataaggaaatgatgaaatgatgaaatgatgaaatgaaatgatgaaatgaagtgaaatgaaatgaaatgatgaaaagatcaaatgatgaaatgatatgaaatgatgaaatgaaatcaaatgatgaaatgaagtgacatgattaaatgatgaaataatgaaatgaaatgatgaaatgatgaatagatgaaatgatcaaatgaaatgaaatgatgagatgaaaagatgaaatgagatgaaatgaaatcatgagatgaaatgatgaaatgatgagatgaagtgaaatgatgaaatgaaatgaagtgacgaaatgcaaaygatgagatgaaatgatgaaatgaaataatgaaatgaaaggatgaaatgatgagatgaaatgatgaaaggatgaaatgaaatgaaatgaggaaatgaaatgatgaaattatgaagtgaaatgatgaaatgaaaagatgaagtgatgaaatgatgttatgaaatgatgaaatgatgaaatgaagtcaaatgatgaaatgatgaaatggtgaaatgaaatgatgaaataaatgaaatgaaatgaattgatgaaatgatgaaatgaaatgcaatgagatgaaaagatgaaatgacgagatgaaaagatgaaatgatgagatgaaatgaaatcatgagatgaaatgaataaatgagatgaagtgaaatgatgaaatgaaatgttgtgatgaaatgatgaaatgatgaaatgatgagatgaaatgagatgaaatgatgaaatgaaaagatgaaatgatgaaatgaggaaatgaaatgaaatgatgaaatagatgaaccaaaaatacttattcattttttttcttggcatccttctaagagtattttagtgaggttaatttctaaaaataaattgctattcaatggctatacagttggcctttacaccacaggggtttgaactgtgcaggtccacttagcaaaaccaacaattctacatctttctccacaccctgcccaggaaaaggatgaggatgaagacctgtctgatcatctacttccatttaataactagtaaatatattttccttatsattttctttttcttttctctggcatgtttgttaagaatacagtatataagacatataacatattaaatatgtgttaattgactgcttgtgttatttgtaaggcttacagtaggctattagtagttaagttttgggggagtcaaagttatagtggattttctactgtgcagtkgggccagcgccccaacctccgtgttgcttaagggtcaactgtacwtgttatttcctttcctgtaagagaaaaatgatgagaaggtcttttctccaataagtgtattcaaaatgtagcagatttgaaatgtgttggcgccaccattttgcatctcactttgaaaacttattattaaaaatcgtactaaagcctaccttacttttccaaccttagaaaaaatgttrcaaagaaaaggggtgaatccatgctagtttgcactgaaatttgaaattatcttttaaaaatatatttttactttaattacttccaaaatagagatcagttgcatacaaatggcaggtcactctaatccaccctatgactgcacttagattcatgaggaattgtgccaactagaaagggcagagaagaggaatagagtgctctgcgtcttgaaatataaacatgcacatagccacatgctttgattctgttatcactgggtacttactgctaggaagagggcacgtttgtgtatttttatgctaattattatccaagttgttaatgatttaggctttcagaaccatataaagatttttttcctttcagatataaactatcttgcattgttcttctgaccatatgagggataaatttgcctaaacattcttcagaccataatatgatgtccatataaatgccagtagcaagagtagaatcaaccacaactgcctttgtaattatttaaagcatgtgtgcctataagtaattggcattttatataatcaagaatctttgatataatratctctcaasyatttgaaacatggctcacatatattaattttatatgcaaatatatatataacatcactgtatatgaaactaaattttggactttagaacagcttcttagaatcttgacttaaatgtccacagtaatatttgacttaaaaaatttagcacactgtcactatgatgaaaaaaattactataaaattatttaaaaaatttttccaccctaacatttagaayattctcacatttgtggttaaaacctattgtgattgttcttagaatttagataaaaaatgttccagaaagtttgaagagaagcactttagtcgatttttatttgttcaagcatgaagaaatggcatttcattgacattttaaaaactattcagattccctctttgaattgaagtgtttcaaagatatcttattttaaaataccaaaataggaatagaatatgaagggctggttatgagtaatatgatacacktttwtgagaggatgagattacaataacaatacctcctctcatagaatagccagcaagtctccactaaataasagtgccttgattttataratgyttaatcatggatattgaghwaatgygaacsatttgtagacacaggagtttattaargaattatataatayctttcaagtgttgaaattaagcctgcatccccacrattttcagaggtgctgatgcctaataaactcaaccccttgcatgccaaaattggcttaaagcccacccattacccaagctacacttcaagcatcaaggttcaaaaatgtaattttaaatatgcaagagtttgaggaattcactactcacactttcttgaacagtctatccaagtgcatcaagcaaaatgtgagtaaagaaattttgaccaaaggattgatagtaatgttgaaaacatttaatagtagatctaagattaaaaggtgagagtgagggtgagaagagtgtatgaatgctttgtgttctgacaaagagaatgtagcacccatgtcctacctgcttggttgcattgccagtgcccacggtaggctattttatccaggtttttagttttttttgtttgtttgttttcttttgktttttttttttttttttttcaggagagttagtccaaaaccaataactccataactggtaraattggaagactttaatagtgcttaacattttgtacatagctttataacagttttctttttcttttttttctgagagattcttttcaatataccccatcatggttgaactcaaagtcattgcttatttgaaatttacaactgctgacgttttgtaaccttcgcattccaggtaattggttttttgtgcattttctgtatttttctccatcagtctacctagatatttgttagatttaatattttaatatttttctgaaaaagtgagcttttgcgtttttaaatatatactcagttgctttaatactgctttttcatgtactggttcctcctttttttttttttttttttttgagatggagtcttgctctgtcgccgaagctggagtgcattgatctctactcactgcaacctccacccgccacgttcaagcaattctcccacctcagcctcccgagtagctgggattacaggtgcatgccaccatgccaggctaatttttgtatatttagtagagaatgggtttcaccatgttggaccaggctggtctcgaactcctgacctcaggtgatccacctgcctcggcctcccaaagtgctgggattacaggcgtgaaccatggcacctggctatttccttcattctttatgtttattttactggttttatctctctctctctcactgtttctctccttctcatattcactttgcagttgtcaaatagcccaggtgatgttacagatttactccttataaaaggaggcattacacattayacwtgcatcttagtggccttacaaaagtgtttggttcatttgtattgactattsacctttaaaatatttcaatattcattaaaatagcttccagccaatattattagacctatgtttctagctttcttttttgtattgatatctaccttcattgctgtttgtttaggaaatatattctgtgtcacgttattttcgtgaaaattgtttgaatttgtggtatggtctagaaaatgttaatttttgtaagtattctgtatgaacatgaaaataacatgaattataatattcatgttccttatataacatttgccctttttaaaatccactagcttcttttaaaacttactcttttaattttttcttttatctattactgaaagatgtgtgtttcaaaagtctataatgatttgggggcttatccatttctacttactttctgatatttttgctttatataatttgactctctctctaaatacgtatatgtgtgagtgtgtggtgtgtgtgtatatatgtatgtatgtatcaggctaatgcacatttaagtcatcacatcgtcttaataacttaaatcttttatcacactggttagactaacttattttaataaatgtttctaacttacattctattttgtctacatagcaagtttttaaaaaattatattcatgtagtatgtttgtatgtatatcatatatacacagtatctgtattgtttgaacttcaaagtttctgtaaattaatatattagttacctctcttgtaactatgatagagatggacttttttaattttgccaatctttgtattttaacaaaaacattgtctacttaggtttaagttaatctttgatcatttatacttaatttgttttattaatttgttgtatatatatatattgtctcattttctcctattagtttctgtcttcttgtttttaaattatgacttttatttttattgttttcatagataacaacagagaaatgcataacgtccagtgaatttattaaagttccaaagtcggtcacgtgcagtggctcacgcctgtaatctcaacacttcgggaggccgaggcatgtggatcacgaggtcaggagttggagactatcctgaccaacgtggtgaaaccccgtctgtactaaaaatacaaaaattagccaggcatggtggcacgcggctgtaatccccgctactcaggaggctgaggcaggagaattgcttgaacctgggaggcagaggttgcagtgagccgagatggcaccactgcattccagcctgggcgaaagaatgagtgagactccttctcaaaaaaaaaaaaaaaaaaaaaaaaagagttgcaaagtcatactcacctttctgctyttgtcagacaattaaggggtctttgaatacttcagccctaataatttgcttcctaacatacatattgcagtgcttatctaattttaaatatatttttgtttcaacacctaattttttatttaaatctatctgtatgtttacaatatattttgctctgtgttcattctttgatttcagaacttcaacctttctgaagcatgttttcagtttctttagtggaattctgctggaggcgttttgttttttgtctctaaatatgttatttagccataggttgatgaatatttttcttggttgagaatttcagaatggcattattagtcttaacaaataatattgtttattttacmtttcattctttctgatttcaatatgattaaaggtaatttgatttttctagtgctaattgaaatatttttcccttcctgattgtttactatttctctaggagatacataggtgtaggtttatctccaytgtagcttgcttagcgtgcatggaacttttgaatatgcagattagtgtcttacaaaagtctrgagaactttcagccaaaataccatcacatattgtcccttcccagttcccttcttctatgagaacacwcactaaacacatgctacattttctcacygtatcttccatgtctcttaatgactctgtccacattttgcatttttaaaaattttctgtaatgcattctgaaatatttatgaactctcaccatggccatgtctaatctgatgagttcatttttgagtttttaatttaaaatactatatttttatgcaaactacttttcaaatttgctacatcaattttttagtctcctaaaatatattctttttattttaaatttttttaaagcaaatgtgctttataatctaacagtgatatttctacyaatgaacctttatggatctgtttgtactctttttctgctttcctttcaaatgttggaatatcatttccttgtgtacttagatgcctttgaatgacaaatatttatttttctccgaaaattatttttgtgcacttttgagtattagtaagaagaaaacttgccaaagagaatttgaatttttttgtgagtctactaaaggcatcaccattctgggaccacattatgttaattcttggtctaaaggtgtttggatgtatgttcggactgcacatttaaacaattttttaattaattgctgtaaatcattagtgattgagtttctttaaatctgtccaatctcaagtcatttttatttgccatttccagggaatgtgaaatgggattaatttacctctgattcttctttatactgaggatagaaattttggtcctagctttagggaggagctcctgtgtgatgccctatcttgggaaacactatgtatttctttactgtcctatgtgatgtatgacagtaggaatctgcactcattcattttggtacatgtccgtagggcaaaatcagtttcggtgtttaggtatattttgtctgctccctgcagtcccatggttttgaacttatattttactttttttttgtgaacataccaatgcttcaatttttttccagtaatataatcaactatattatgagaaagagaaaaattttgakaaaacacaaatttcatgttttcctactctaattggcttttacataaaaatacaggtaaaatttatttttgcttttttgctatttctgttttgctattctgtttgtctatgtcttctccacatagacacaattagggaattttgtacactcttgtgccaactgctttgatagtaacaaaatgtatttctcgaactcctaggtataaaactcaagtatccgcaatttaaattctttttysctcacttctattatgtttccggtctcaatagaaatcgatgccaatccagaaatacaagcattattctaatacttctcacacattacagagatagattaaattttctagatctccttaaatactatcatttttcactacttttatcttaactgttaagttcaacattttctataatattaatatattgtgaaaatttccttactttcttatttgtcccaggttaaatgttttgcagtctctacctcaccctgtgacgcataaacactgtacatgctgtacaaataatacatagttcatgtgcttagagattgcacaatttttatttggttgataatagctaatgttttcttcttcattttctatttcctgatttttctttatttagtatatactacattatcataaaaataagaacgttttacaaactaaagcaaaagcaaccctaggaataaaatgcacaaataaaatatgtaaacatacaattagrtgtaccatgtacccctctaatttatttagacatttaattttagtacgattttaattaaagtctgtgtattacctgtcatcgtcttagtattttttatataacaaattttgtaaatcaaaaagtctcaatgtcattataaactatcttggcagaggttgatctccaagaataattcctctcccaaattataccaattagaatttcactataccataattcttttaatcagtttcagaggaataataaatttcaaaattgttcaaggtacttgttgtagttcaagtacattttgacatgtgtaaaactgtagacagactgatataaacatattctaattgactcaaaaatatagattttaaaatgtcgtgtcaatatatacatgttctccttgtgaaataattgctttttattctctggatagaatactttaatctttaaaccttcaattcactgttaaaaacaaaatattacataaggatatgcttataaaaataattcacaactagcttttcaattcagaaatatatgtgaaaaatcatcaagcatctaatggatttcaaggagaaatgggttagtaatttattccatatgtcttgatttttcctagacacaaggcttcctttaaaataattgtaggcatttaagaaaccatgtaaactaaaaagaagaaattgtgacactgccacttaggttttttaaatctttggacatgaatcaatatattttttaattttatcttaattagacattgtgagttcaccatcttcctgtcagtatagcatccaagatgattatcatagattacaagttcaactatcaactgtgttctgagagtttaaaaaaataaatgaatgtatttgttttggtattcttaaagcaggagtgaggacacagtgaaagtgagacaaggaagagagaacaaaataaaacaggaaagatagaaaagccaataccacacttgttaagaggcaagttcctgtgttagatatctgggcttaattctctgggaagctatgtggaacatgcctcagaattacatcactgaatccagggagattcttcttagttaccctcaccttttcttcccacttcatgcccagtaacaagctcccgtgctgctagagaaagtcctcagctagaaacaggtgcaaattctggagatgagaccttgtagagtgttaagaatgattttcttcccagcagctacaggtgaggaataggggctgggctattaatacacctgctacaaatcaatatacaccttatgctccttttggtgatcgacaatgtattttaaaatattagatgatcaagaagggctgcagaaaggaggaaacagaaacaaacagcacacctcttggtttatttttattcatttcatcagtgtcaaggaaaatgtgttgggagttcctggcatagagaatgtcacaaagacatgttttcaatagtggtgctatccctagggcagagaagacccagagaaagcccaagtggctgctggaacaaagtcagacaccgtgccacctgtccacacttcttggctctgccatcatgctgaagatcggttgaaaggactcccttccctmcccccaaaattaaaagagcacaaactgagaaactgaatgtaggagacagcagtggattatgctgttctcaggggtcatctcaggtttggaagcattctttcaaactaacccatctcaggccatctgcagaaaagaaacgtggtacctaactttttttcttgtcagcatttggtargggtgttttattgaccaaatatgttcccacaacctagttttttgtaactaactgaatatagtagatttttaaattttatcatcaaaatctatagacaattttttattaaaatagactccacatctatgtcctgcttttcttcttcttattaattacagtgctgtataaaagaacaagacttcagaatcaagaatatcttgtctcttggcattgaatttatacaaggtgctctttctttaatgctgtctcaaaggacacatttttactcattaaaaaggaagatcggaatctagttgtatgcactgctccaacatattaataattaaaattaggaggtaaatgtggtcaaagctatagaaagacttgagatgtcatttatattgattactgtatagcactctacaaacagaaattgttaaataatagtttatataaatattttgtagcatttcaaatattttagtgcctgaagtttctcctcttatatagttcagattatcaatttggagacttactccgctagttaaaatgtttttagtctcgtttgagtattatataaaagcaattttcagttaaatgtgttccgcttacataaaacattacaaattagtgaggatttaattacattttcatgttcctgtaatgtctttagaagattttcatattattacctatcaatatatgtatgctttgtcaaagaaaagtcaaacatatatatcattgaaatcgaaaatttttaaaagtacttattaattctattgaaaaaccacatccatagcaacaattacaatatagtgaacatgtaaatatatatcctatgtctattttatatataagcatatatgattaaaaatatagttaataatttttaaacctagttttataaagtaaaaattagttaacttctgatgattatttgttaatgaagatataattattttgatttgggtgattttaaataaaaatattaaattacgtgacaaagttttttataaaatgtttatgatttttacattggttttatcactttattccactattttattttaagatgacctgccttgtttaaaacaatcttaattaaattaaattccattttgtaaaaaaattaacaaatgatttgctctattatacattgcgtttataaactgagtcagtatctcaagatttgatccccattatcatcatctgtggccctatttgttttataaatgtattgtctttttccatgcctgtcacgtctctattgctcattcattttctctttgtcccttatagggagttgcatcttaaaaaagcacaataacctcctcattctttttcacacagagaaatgtttgttaagtaattaaagtgtagatgatgatacaaagagcttgattaaattagatgycaaagtacccttgtgattcasaatatgaatggtatttaatttctttgaaatcaataattgctgagtgacattaattaatgccartatttcagaagttgttctagttagtgaaatgtatacaacatgcaaaagtttcagaactctgaagggcaacattattctatrattaagaattcacattaattattggggagaaattattaagaattaatgactgagaaaatgattttatttagaaaattrttttgtgcatgagcattactgcaagttttgcaagaaacataaatttaaagaaacaattatgtccacaaggtgaatttaataacatctgatattttccatgattacagttttatttggtaaatctttaaatrcacatcatctaaagataataaatgaatcttggaaatcttgtaggtaagggtaaatrttaggatgcaattggtaacctaaatgttaccaattacatttacaacacatacaattacattttcacacacatgcacacactcactgatacacgtgtgtatatatatacatgaatttactaattggttttaactaattattataagagccagtaggattgatatatattgttgaacctgaaaaatatttattatatacatgtttaaaatacacaaagaaataaatagtaattaaactaggcatttgaaactctactaaaatataagctgtgaacattttgtgatcattacaaattcttacactgaataaattatttttatactattaatatgttggatacatgtgtacattttttacaatgtattattttatttttgtcatagagtcatgtcatgcataataacatttcagtcaaagatggattacatatacaaaagtggtcccatgagattataatatatatttttacatacttttctatgtttaagtatgtttagatacataaactcttaccactgcgttcttattgcctgcagtattctgtacagtaatgtagtacacaggtttgtagcctaggagagagaggctataccatttaacctagacgtggtaggctgtacaatctaggtgtttgtaatactctctgtgatgtttgcaaaatgatgaaattgcctayggatgcatctcttagaacgtatccctatcattcagtgatgtgtgactctactaaaatgctcaatgtaagtttcaatgccctccataaaattgttgtactgtgaaatacaaatctctcacccatggcctgaatatgtttacaaactaagcagatcatgggaaggagaatgtgctggcatcgctgggatgatttttctcacactacatgaataatatctccagactttgcgaatatgagccacttgcatagagttaaagtaggcatctctttgctgggaaatttatcaaatggcagtatgaagggttcttaaaagatacttgtttgtttgtagcaggtaggcctacactggctcatggcaatggttgaggttgctaagatttggtggaaggaggcaaaatgaaatggccacttatatggtatatggatcacttgtttctgttgagttacagattcagctgactctttctcccaatgttagttattcagagaaaraaaacatgatagtaattttggggtgacaaatacaatatttgatgaaagcaaatttattgagggttagacaaactacaagatactttaggctgcaaagtcaacacaagacttctggcccaaattgtgcagagtttgggtccagctgcaaagttcaaaagaagaggccacgtaagactattctcacttctgacaccaactgccagttcaggggtttccccagaacaccctcagtttcaagaatttactagaaagactcacggaactcattgaatgctattgtactcatggtttataatagagaaagggtagaaattaggaccaatcaatggaagagacatatcatataaggtggaatctaggaggattttgaatgttaagtttccattgtcttcaggacatattacctgtcattgttgtacagcaataaacatggcgtactaccaacctggggagctcacctgatgctaaaaagatactatttagttaatgaaaaggcaaatgaaaggatgagataagatgaccttccacattaaggcactggaaaaaatagcaaactaaacctaaagcaagcagaaggaagaaaataaaaattagagaaattaataatttataataatatttgttagtataattgatattaattcttgactttttttaaaaagagaaatattcacttcccaatttattctgtggggccagtgttaccttgatacaaaagttagtccaaatagcatagaaaaataaaactactataagtataaatgcaaaatcccttaaaaaaatactaacaaataaaatctagcaacatataaaagaattatacactatgacaaagtgaaatttatactagtaatcccaggttagtttaacagcccaaaatccatgaaggtaatacatcttatccatagaataagaaacaagaattgcatgatcatctcgatagattcagaaaagacatttaacaaaatctaaatgctttaatgattaaaaataaaaataaaaactcaatgaaccaggaatagagaactttctacaccagatacatggcacctgtgaaaagccaacagcaaacattcaacttagtggtgaaagaaaggataatttcccgctatggtcggagataagaataagatatatactttgacctcttctagtcgacactgtgctaaagattttatgcacggcaaatcggccagtaaagaaataagagtcacccatattgaacaggaggaaataaaactttatttgcaaataacattcttgtatatagaaaattttaaggaatccactgaatgatagaactagtaaattatttcagcaatattacagcatacaagataaatatacaaaaatcaattgcacacatctacaatgaaaaccccaaaatgaaattaagaaaacacttcaatttacaatagcatcaaaaaaagaaataataattaatttggaaagtgtgatacaatattttactctgaaatttaaaaattattgtctaaagaagatctaaataattagcaaatatcttacagccatgaattggaagacttaatattgtagtactttacaatttgaactacagatctgatgaaatccctgcaagtatcccaacagacttctgtctagaaactgacaagctgattctaaaatacacatggaattgtaagggactcaaaatagccaaaataatcttgaaaaaagaaaacatgttaggataattcacacccccattctccaaactttactgcaaagcatcagtaatcaagacaacacaataccratgaaggaaaaatatatagattgatgattctacacataaatgagatcacacaacatttgtctttcttcgtctggcttattccacttagaataatgttctctatgtgttgttgcaaatgtaagaatttccttgtttttaaaggctgaataatttcacttttatgtaggtataagccacattttatctgttcattcatagatggatatggacttctttcccaagtctaggctattaggaataatctcacaatgaacatatagttgacacactcactttattttctctagatgtatgctcagaagtgggtatactctatgttcaattcactgagtaatctccatgtcgtttttcataatggctgtactaatttacatttttttccaaaccatacatggataactttgtaccacatattcaggtatttgtttaagtcttgaatccatttttagctgatttctgtgtatcatgtgaggtaaggttcattttttttcttctgcatatggatgcccagttttcacaccacttcttgaagagactgtcctctctctattgtctgtccttggcaatttgtcaaagatcagtttattgggaaggaatgggttgatttccaggttgtctataatgttccattggactctatgtctgtttacatgtcagcattatactgttttgatttatattgatttgattttgaaattatagaatatgatatattcagctttgttaaattgtgcccaaaattactttggctatttaaaggcctttgtatttgatataactggagaaawttttaatatttttgtaaaaacatgccatggagattatttattttattggcatataatagatatacatattttatgggaacatgtaatatattgatacatttataaatgtgtaaagagcagatcaggattggtatatctgattggtatatctatcacattaaacatgtatattctctttatgctaggcacatttgaacgactcttctagctattttaatgtgtacattagattatagttaactatagtcaccttactcatctatgaaatatttagattttatttcttctatataactatatatctgtattcagtaatcaacctctctttattctcttctcccttgtatctatccaggcttctggtaaaaaccaatctactctctgtcttcaggaaatccaattttttagttttgacataaaagtaagaagatgcagtatttgtctttctgtgcttggtttatttaacttaacattagggcttccacttccattcatattgttgcaaatgacaagatatcaacattgatggctgaataatattctattgcatacctagatcatatttttttatccatttgtccacctgcagaccctgaggtgctttcatatctgggctattgtgaatagagctgcaaagaacatggagtgcacatgcctttatgaggtggtgattttatcttctttagaacatacccagaataggatttgccacgtcatcaggtatttctatttttcttttatttcggagtcttcatactactttgcacaatagtggaaatacaaatggaataaccattataaaaagcagtttcagttttgaggtatgatccaaaaccaaataatgtttcctcatgattctcattgggagtctctaatgaatctggtggaaatgtaggaagttttctaacctcgttaagaaaattatgagtttgcaccttttttctttttgaggctggaaattggcatgattcaagttgcatactcttggcaggtttcagaatggtacagcagaaatcataatgagagggcaagagagagaatgagggaaagtcaggcaaacaaagaaaaaaaataaatttcacaagaggagaaactgctggatatcagtgttgggttttggtcacagacacatctgtactgagtgaggaaccatgaagtcaagggaggagtctagaacttgttcacctgaagcatcagcatatttctccgaggcacctaattgccaccacatcacaagggtgatgaatatttggatgccattaaacatgagctcccaggaagtaatcatgtttccatgaaattcagttaaaatgccaagggtgtgtccagatcattcatgcaaaaacacaaaatttgcctttgcatttatggttatctagagacaaagtgcattgagacttcagcaggtttcagagatctgttaagtttggggttcccataggagagcaccttttagtaaaggctggtctatttattaagtaggtacaaatcccctctatgggagtagtgttccaattgtgtggaatttttaattccttattgagttgtaaaaaaaaaaatcccaaggattgactccatggagttttacttctgtgatgataaaaatatttaataagattccttccagtgtttcaaggaaagtttttctctaatttttttccaatatataaattttcctggctaaaggttataagaggctgttgttaaaaagacatactggaatggcaactttaatctgttggtgataggagtgagcataatacatgaatctctttgagggttctgcctcatccaaatacagtatggcaaaggagtattgggggtaaaatctctaaatgtattttttccagcaatcaagtcatgaggcaataacagattcatccttaaggcagaggaccataatgccacagtgctagtaggagtacatgtggccaagggagttcaagggttccttaatattgtgacaattttgatataagtatacattagtagagacagggtttcaacatgttggtcaggctggtctcaaactcctgaccacatgaaccgcctgcctcagcctcccaaagtgctgagattacaggcatgagacaccatgtccagctggtccatttattttcttctgcatgtgcatacccataaacttatgtggaagattgtaggaggttataacagtgtcgtactttagtatcagccgtgtcttacagagtcattttataatagttcctttcatgggtgtgcttcactcagttcatgcaaaacctggcaggtcacaggctaaaaacacaaaatgcagaagcttttaatcaactgaaagggctgtagccttttgtcaaagaattatttcaagacacagagatcacagatagatgataaataaaatatattcacatccccttaagggtgggaactgaggaaagtttacctaaatatgtccaaagggccctgtggctcaattctgtctaggtcccaatgtaaggattctcccaggattttgtggctagcttgtcacacctcatcaataattaacctctgctgattcctcaaggtgtttatttaattggataaccaatttgtctataaattgtagagttgaaataaaaaaattcatttgtaataatctggcacaaattatctaagcaaagtcgataactagatatttttcattcatttttatttaaaaccaggggctaaccattgatatttttaaataacatctgtgactctctcagcagttttctcttctgaggatataacctggtgtggcagttttcttagcttcagtgttacttacctctttttgcattgaattccacctttatatttgccaggaatctgggataaaggagtgcttctaagaactccctaccttgcccatgttgggggctgttccagaatatgtgagatgctctattgtttacaaagcatcccagagccatgcactgctctaaaacatgtttatttcctggtttgacaaattggaatttctaataaatgcaatcacttctgccatctgggctgattttacatcaggtagaagactgtattctaaggaaacacattagtaacagcaattttagtcaaaaacctagagttttattattgaggcatgattcataaaattatattaggctgaggttctcagtggcggtgtctaaacctcttgggtgtacagggtcttccctactaacatgaagcatttatgagcacggtcatagtttccagccatgcttctccctgtctccctatcaccacaaactaactatgacctcacctgcaacctgggttaatttccaaataagttattttttaatctttatgcctctagatgattatgtgaggctatttcagtagaaagttaaaaataacatttgaactgactaaccaacacagaaaatcactgataaaatgcaaagcctggacgtcagaggctccaggccgataatgcaacagtatgcaggcagtttcttcacccagttctgcactgacacacccagcatgtcagcttcatgcctcatttgactccaattatgtagagacatggcaaggacattctcaagggtcacacacagatatgaaaattggtgggagcaggggatgagacgactctgcaattctcctctgaaggaccaaaacagcctggacagacctgggcgtggtggttcacgcctgtcgtcccagcactttgggaggccgaggggggcggatcacctgaggacaggagtttgacaccagcctgaccaacatagagaaaccccgtctctactaaaaatacaaaaattacccaggcgtggtggcagcgcctgtagtcccagctactcgggaggctgaggcaggaaaatggcgcgaacccaggaggcggagtttgcagtgagtggagatggcgccactgcactccagcctgggcgacagagcgaaactccctctcaaaaaaaaaaaaaaaaaaaagaaagaaagaaagagaaaaaaaaagaaattacaaaaaattagctggacgtggtggtgggcgactgtgttcccagctacttgggaggctgaggcaggagaatcgcttgaacccgggaggcggtggtagaagtgagccgagatcgcgtctttgcactgcagcccgggtgacagagcaagactcccgtcaaaaaaaaaaaaaaagagacatgcaaagggcaatagatcatacatagatagatagatagctatatgagtatatacatacacatattgctagaaatcactaatattcaggaaaatgcgaattcacaatgaggtgtcttttcacccttcatctctgctagaaaggctgttgtctgaaagacaagtaaataaataaataaatatcaaaagctggccaggatgcctagaaaggaaaactcctatagaccactggaggaaatgtgaattagtacagccatcaagggaaaaaaaatggaactaccatataatccagcaatccaactgctgagtatatatctatttaaataattaaaagaaaaaactaatattgaagagatacatatacacccatgtttactgcagcactaatcacaatagctaagatatgaaatcaacgtatgcgtccatcaacagttgaatggataaataaaatgtggtatatttacacaatggaatattattcagatttatcagtgaaattctgtcacttgaagcaacatgcatggaactggacaccattttgttgagtgaaacaagccagacacagacaaataaatacggcatttctcagtgttctatggaaatttttaaaaagttgatcttccagaagtaaatagtagagtagtggttatgagaggctgggaatgggtggagactgagagataagaagaggtttgttaacaatgcacaattacaagtagacaggagggatgtgctgtagtgtcctacagtgcagtagggtgactacagttaacaatatattgtacattttctgtttacaagtaaccagaagacagaagtttgtatgctactaacaagttaatgttagtgtctgagctgattaatttgctcactgttctgattttggtcatacctcacggcacacatgtattgaaatgtcacaatgtactccataagtataaacagttattatgtgccaactttaaaaaatcctttaattaaaaagaattatattggtgtacattacaaatgattcaacacagagacaggaataaataccatttttctttgaaatagtgaattaactaacaatgcagttacattcatttgcaccaaactgtgtatttgatcatggtaagcatagacagaattatgcatagaataatatgttttaattttagactagtacttattactataaatgtaaataattttaaaacagctaagtaaaaataataaagttgaggaaatgtgtgtgtggtgtatgatgtgtgagctttttcttgtgcaccactgtgtccagggtggatgtgtggtgtgtgtctgtgtctgtttgtgtttactctgcttggggttctctgtgattctaggatctggacttcagtgtctttcacaaaatggggaaaattcttagccattattttttcaattactttccctgtatttataatttctcctcagatttaaaatataaatatactataattttgatattaatgtttaatttctttcttcacttccttttctttgcaatttactttgtgaaatttctagtgacattttaagcacatggtttcatttaaaagctgagccagctctactgaggggtgtgcccaaagcttgatcaatgtttatactgcagtgcttttgatttcttatgcatttccatttgatttcttcttagtattttcatatttcagttacctatttagtcctgcattatgtccacagttgcttcaagagattgttgcatatgaattagagttactttacatatcttgtttaattagttataatatctgtatcatttacaaatctcatgctgatctcttttattatgactttgatatttctcattaatttatgtaataattgtggatagtcacacatgttgggagggacagttggtattggtttattatttctttcttttttttttttttgaaacggagtcttgctctgtcgccgaggctggagtgcagtggtgcgatctcagctcactgcaagctccgcatcccaggttcacgccattctcctgccgcagcctccggagtagctgggactacaggtgcctgccaccatgcccagctaagttgttgtatttttcgtagagacggggtttcaccatgttagccaagatggtctcaatctcctgacctcgtgatccacccgcctcggcctcccagtgtgctgggattacagacgtgagccactgcgcccggcctattatttcattttatgcattttctgcctgtatttgatcatactttacctttgccaggcctttattgtggaagtgtctgtgaatcttctcaaagctacatttgacatttacttttgcagtggacttcatagttgaagtctgttcttctgtgtccaccagagacttcagatcctccagtgataccttgtttttctttcctgcttggctttgtctcttcacctgttccctcctccagagaatcatgttcagctccctcaggtggattaaaatgttatttaactgaaaattctgaaattggtggaaagcaatagaataaagggagattatctgaccttccctgggttcatattgtgaacatgagtctgggtgtgacctttccaatgtttctgaacttcctccaaatgagatgttggtctgtgtgttcttgctcttttccctgctgtggagtcctcttgttttccccagttgttccctcccacagctccaatgttctcttttggtgttatcaccttccagatttgctgacttgaactgcagattaaggctgtgattaaataagaaagagaggggaggtagttctcaatggaacttagaagaagacctcttttcccatctcagttcctaagaggttgccctrgtgcctctatgatactggttttagtggctttccctgcagagtaatttcttaattctccaatggggatacagaaggtggatctgaatgcttttcagaagtgtgggcactttttctctcctagacagacacattgggactgaaagatttttgtgactgtccccattctggggaaaaggcattcaacaggataggaaagctcttcagtatgtggtctcttggaaattcacactacaacacatttaccacacttgacttcaaagcaatccaatatataagtgtgtttttatcttataacagcctacattttatgacatatgctgcctcagttcaactcataccccagctttgttattctcaacaaaaacttgcctgtccctagatttcacatttgatgtttaccttaaaacttcaagtatctaaagttttataagaataaattggccggttgcagtggttcacacctgtaatcccaaagctttgggaggccgaggtgagtggatcacctgaggttatgagtttgagaccagcctggccaacatggtaaaacctttctctactaaaaatacaaaaatattagccaagcatggtggcaggaacctgtaatcccagctactaaggaggctgagactggagaatcacttgaacccaggaggcagagtttgcaagtcgtgccattgtactccagcctgggtgacagagtgagactcagtctcaaaaaaaattgcaaaattccagcttctttatgtgttattgttgatattgttgttgaaaaaaataagtaaaatatattactcatctatgtccatttccaagctgtgcagaagattttttagtaagacccagagtaataaaagaaagcaaatattgttaagctgttcaacagaaaaacaaattatgtgttcggtggaatactatccatcatttataataaattaatgcctgatacacagaacaacaaggtaaaaaatctaagtatttatgttgagtaaaataagccaaataaaaatatatactctgttatttcatttttataaattttgataaaaatgcatctaaagtaatataatgaagatcagtacttgcctggggaaatggtagaagaagggaaggggagaggaggaggaatatagcagaacaggaggaaatgttgagaaaaattcactagtccactttsttgataatgatgagagttacatcatgtttattaattgtacattttaaatgtgtgaagtatattacctttcaattaagcctcataaaatgtattacaagcaaacaaacagaaacttagacaaggaaggagtaaaactttgacaagaaagatagaaaaaataagttaaatgtcagaagtacctgaaaattaatgtgtctggaccctagttctctccatattttcaggcgagtgctggagtgcagcaaaaccacatgtgctcttattacggaaagcgggttctaataaaaacactagacacatccagctttgtcctggagttggtttagggagcaatcaggacctgtgatgaggaacacagggcgagttactggggttcactcatcccagacatgagctcctagatgtacgcagagcccccttcacatgtgggtttacttctgcatccataaatgagaaaatattgactctacagaacatagcttacacgaatatttaaaaatgaaatagggtgatcctggcaaagtgtttatcacagcacaatttcataagacagcgtattttccaaataccatcattctcagcaaacttctgcagggcaccattgccttatctgggtacagcctactcctcaagggtcccaccctagatcttgttatatagtaggagacatgcaaatagggccctccagggcaggtgcaggtgctgctaagggttttcaattctgtactaacatctgatgtctctaaatgcaaaccttttcttcctttttgtttcggtttttttgtttgtttgtttgtttacagtaggacacatcctcacctccacagaacccgcagtgtcactttgggggcagaaataattatttcgtggtcaacaggatgaaagtcctgaggatgctcaggggaacctggagagtgttttccagttagactcagggcagagacctccatgggaatctctgattagaacaggctttgagttctgataggagctaagagagaggctcacccagggtcagggtccttaaaaccacatggttttcacagctrtcccccctcgtcttgtaaaactgggcacgtctgactcagactgattcagttgaccctctttctgctaatccattttccttccctgtagacttgattctcacaattccctttcttcttctctgccctgaaaactgagtatgtgttatctgtagtcaaaatcccagggctcaggtctgcaggacctgggtagtctgaggggactttctcactcacccttgcctggactctcctgctgtcytctgtcaacggagatgtttggaaaacgaaacggaccttaatcacaaagggaataatcctagttttctccaatgggatattgatgtagagctgatcttatgcttttcacactgtcacagagtttggactgtcacctgtgactttgaggagagctgatgatggacactccatcgtgctgtgagctctggatagtagtaattgtagggtctggctaggcagcctaagatcaatactgctggccttcaggaaagacaggctggaattcctgggaagacctgcatctgccgtacagcttggagtcccatcgtcttctgttatgctctgattgaatcagccccacctcgattatttagaacaatcttcgtgacttaggaaaagataatggcaggctctactaacgcctgtattatgccatgggagcaacacctaggttagtgtgtgatttagtagatgagacagtggtctagtcaaggtgacaaataaaattgattgttgccattatgatattttattttggcaatattatgatatttggcaatataatgatgttcatattataaatatttcactacattatttgtgtcagaggctttggaaccagaacaacttcatcttgaataaaggctaagaaaaataagactgagacctgctgggctacattaccagtaagctaaggcgttcttagtcacaggatgagaaaggaggtctgcacaacatccaggtcataaagaccttgctgatgaagtttacagtaaagatgcggccaaagcccaccaaaaccaagacagtgacaaaagtgaccgctgtttgtcctcactgctaattttatgctaattataataatatgctaaaagacactccccccagcgccatgacagtttacaaatgccatggcaacatcaggaagtttccctagttggtctaaaagggagaaatactcagctttggtaacttctgggggattcatgaataatccatcccttgtttaacatataatcaagaaataaccatgaaaatggacaaccagcagcccatattgctgctgtgcctgtggagtagccattctttattcttttactttcctaataaactcgctttcattttactctgtggatttgtcccaaattgggatccctttccagtaacatttgtgttattattcattttctaagcagaaaactccaagacggtatgaagtttccctgaatttttataagaagtacatccacccctttgagagaaaatgcacagagagtagaatgaggctgggaagctgatcgtatatgatggaagcatgtccctaagtgaaagagagagggagggtggattgggtggaaggttcctatatttctgtgctgtgcaaggaatctgcaaaatataattgagtsttgtgcaagtcagtgctacctctcagaggaaacccatgactcccagaaatgrctctgcttatgaatcattacaaatgtaattgccaatgcggaaagtggtgtctggtgagaggtattgggtacgtgaagtcatgaatgactttatgcaacacacttggtgacaattgagtttgtgctaacttacttcaagttaaatctagttctttaaaatactttaggactttcctcatctcttctcttgtacctgctctaactatgtaatatatctgctgcccctttgccttcttccatgattgtaagctttctgaggtcctcaccaagagcagatgctggcatcatgcttcctgcatagcatgaccatttggagtttgatggcctgagggtgagaagagacaaaccgggttattagaagacatgtatcaaaaccaaacaaggtggcgaggacagcttgaaaacaaattccaaggctgctgacatgcccagataactgtggctgtagttatgcctgctaagatttgggtgcatggggcttggcttttgtagctcccatggacttattttctcaaacaaagaaacctctggattaggggcaccctatttattccagtcacctggcatgatttgcaggataattgctcagaactaaaatgttgatgcagatgtctatattccccctccctttgtttcttctgagctgcagccagagatcattggttggttcacaggaataagcagagttagtctaaaatggaggcaaatacttaaaacaattgaagagattagaatttaaagacaagtgtatgatatgttttgaaacataatttttctctctccagttctgatttttgtcagaatgtaatcattatacgtctgaattgtttgcaaaataaactttgctctcatggttggcctgataattagcataaagttcagaaagaataattaataataattctgtaggaaaagcstgcaagcactaggagcttcacagtctaacagtatgagcacatgcatcctccagcaacttactcaatatttccaagtcagcctgctcctatcttgaataccatccagtaatatctgcctcaggtacactaatatatggttctctctgcaggctcctctctcctcagatttcaggggtttttttcctctatgatatcaactcagatatgttgaatgttttttctttattttcagttttgtacgtttgttgttaatggggtcaggatagtatctttttttttttgagacggagtctcactctgtcacccaggctggagtgcagtggcgcaatctcggctcactgcaagccccgcctcctgggttcacgccattctcccgcctcagtctcctgagtagctgggactacaggcgactgccaccacgtccggcgaattttttgtatttttagtggagatggggtttcaccattcacaggatggtctcgatctcgaggtcaggatagtatcacagtttactcattttttgcattcccttgccgagtagctgcttttctctataaaatccattaactgagataacaaatcaccttttgttactggtgaacaattagtttggcatatatttatgtactggaatataatgcagcttgaaatcaaggcatgcctcactcataaaaaagcgtggctaaattctcaagttattgtgcagagtgaaagaagctaaggaattaagagtaaattttatataattcatatgtagaaactttagaagatgccactattaaaaattaacatgaataacatttaaatttttctgagaatatggttttgtgaataatgaggatgtgagttaaatttgagaggaataagaaaagatttagggattattcaagacgattgaagtgctgagtgaatggttgcaaacataggtctacatttttcaaatcattcactataaatttgaattaactatttatttattatacttgaataaatcaataacataaataaatgaatatttttgttaaaatggagcaataaaaagactgatattggcagaagaaacatgactgacttctgaaaatacacacacatgaaccttggttctctctgcatatttgggtaaattacagaaagttgtcataacagatagggaatcctgcagacttcactaggcatgggccacactgccctggagttgtctcaggggagctgcctcctccagtgtttagagcacaggcccagataataggactaaatttgtttagatgtataaacttagatgcactgcacaactgctgtattctctatgtaaattatattctgtaaaatataacattgaaagctgcattaaatatattgtgtaaatatgtaaaaataaaatcagattatgagagytaaatgttaatcaaggcacaatcacataatataaaattatattttcctgaatgatggaattactaccaatctcccccargacacttcatctgcacggagcctggccctctcttcagatgtcccaccccagagcttgctatatagtgggggacatggaaataggggcctccctctgctgatgaaaaccagcccagccctgaccctgcagctctgggagaggagccccagcactgggattccgaggctttcyattcggtgatcagcactgaacacagaggactcaccatggagtttgagctcagctgggttttccttgttgctattttacaaggtgattcatggagaactaaagagattgagtgtgagtgaacatgagtgagagaaacactggatatgtgtgggagtttctgaccagtgtctctgtgtttgcaggtgtccactgtgaggtgcagctggtagagtctgggagaggcttggcccagcctggggggtacctaaaactctccggtgcagcctctggattcaccgtcggtagctggtacatgagctggatccaccaggctccagggaagggtctggagtgggtctcatacattagtagtagtggttgtagcacaaactacgcagactctgtgaagggcagattcaccatctccacagacaactcaaagaacacgctctacctgcaaatgaacagcctgagagtggaggacacggccgtgtattactgtgcaagagacacagtgaggggaggtcattgtgcgcccagacacaaatctccctgcaggaacacagggtggaatcagctgcagggggcgctcaggagccactaatcagagtcagccccggaggcaggtgcagatggaggctgatttcctgtcaggatgtgggactttctctacttcttagtttcgccagggaacctctctaagtttagaattctttgcctaacaatgtcttcgctaagtatttgaaggagattattttaatatgaagagctattttcacatgcacaaaatgcagattgatgcttacagggatgaaaagtccatcaatgatagactggattaagaaaatgtggcacatatacaccatggaatactatgcagtcataaaaattgatgagttcgtgtcctttgtagggacatggataaagctggaaaccatcattctcagcaaactatcacaaggacaaaaaaccaaacaccgcatgttctcactcacaggtaggaattgaacaatgagaacacatggacacaggaaggggaacacaccagggcctgttgtggggtgtggggagaggggagggatagcgttaggagatatacctaatgtaaatgatgagttaatgggtgcagcacaccaacatggcacatgtatacatatgtaacaaacctgcacattgtgcacatgt

SEQ ID NO: 94002 - DNA, 27017 bp, Homo sapiens
  misc_feature (1)...(27017): n = A,T,C or G
ggaacccacacctggattgctgggcccaggattggacacaaaactcaggtctcctaactcctaaccctggagtcttttaggatgcagctttcattctgaacaaaatcactgtccagttgatgggcagaacgaaattttacaatgtgaaatgtttgtgtcaggaagtcggggcgtctaaatatttttgagaggtcaaacctgctaacaaagctgaggcctaacttgggcaaacacatacttttcctagagtaacagacactgaaaaggaagcacagttactgtatgttcattctcatctattgtggaattcagctggctaccctcatactcagacttcactctgatgataaaaaattaaaactcctgagacataagcatgcgtatttcctgtatcctgctataatagtaataaggaccaaatcagaaagaattcaagattatacatgtacctttacctttttttctaactgaaaagtctaaagtgagggcagtgaaaccctgtcagttaatatccttgtgatccacatgtttcaaagacagatgccctctactggcgatgctgtttcataaatattctaacaagatgcattaaaaatgtaagagcctttggagagtcacaacagaagcacattttcctgagtaatgggtagtgtggcggccttggcctgtaatgaagtttgaaattacatccttacaaaagacctctagttaatggtgcctcattacaagaatgaaagtgtcatttcttccactgctgaaccgctccaaaaaacacaggtgctacttggaaagaaaaaaatcctagccctagaagcaagaatattgtagcactttgtccttaagaggcaggagtaactattttgtttatgcatgagtgaataaagaaatctttaaatgaaaaagatatgtttactgtgataattctgactttttaagtctcatttattctcaggtatgggggatccaaatagttttttgctcctttcctgctctattttaatctcgatgtatagatttacatcatgaagaataaaataccacaaacattgttttgacatagtaccttttaaaaagtcaaaatgtgctcttacatcatagtcatcaaagtctcaaaaaggaaaaagagtccgttgtcatttatgttgtggatctattaattttcaaatgttgcatctaaaggtgaacctcaataaactaacaaacatttatttccagtactaattgatccaataagtctacatttatcctattttgtcaatttctccatctgtaactatggagggtcaacaactgtggtaggaagtatatcataacaaggtttttgtttttcagttaatgtataagggagagggttgctttagaatacagcaaattctaaccatgtttcagaacagaattctaatgtatttcttccatctcttaccaaacttcaacactctacttttccagactatccatacaatttagattttaactgcatttgacatttaattaaggtctgcaaaggttttgaagatgaaatgccatataatcatttgataacaatgaagaaaatgactattcctagcctcttctttcctgtcttaccaattacagtccttcctcttttgcaaaattcttcacattaccaatgaattcttacacaaatccccgagttttattgtgtcctctccctttagcagttttgctcctaacagaacctttctttacataagttcttaattcacttctaattcactgagataaacaccatgcttaatgctgaatctaagaagtctttcagagagaatgtaaaatgaagcttcaagatgatacaagccataaacattgctcctgagttttctccattcccagctctgccattatctgactcagagaccttggacaaactgcttatcttttttggtcaagtctcaggttgttcatatataaaattatggcaaagatcctttctagctttaaaacttgatgtttctctatttgtattttatttccaaaccagacagacacactgaaagaaacttacactcttcaactatagcataacattccagacaactgcttcacatggcccctccattgccaaaattaaatctgcaggccccaactgattgtgaacttgtgtttctcatcaactgtactcattttttttggatcacctgctataaagcaatcttttttttttctagtttttcttccctagggaaatttatgttggttccaggcatgtgtcgacatactcccttaagaccagcaagcaaaaagttcatttgcttttcccattgtctctaccatcaataaattattcttatttgctcttaaaggtacttctgtctcttccacttattccttacgcgcccactactacaatgggctacctctggcgcaatttccctttcaaactctcctgttttcatgaatttttaacctattttgccctcactcagtaatgtaacagcattcctcagttgctgcggctttgtccttccacagtcatctctgccaaccttgattatactctggaagccctaaatcaaccatatcaaatgtctaaatcttgatatatcctattaaagtagaaatcagaaacccttgcatctgcagtacggtgaacactgtttccactagctttgtacgaactcttctctccgtacccaaaatttttacctcgtttgcagcccctaaatcaggggcaggacagtaggcagttcctggcaaggaagcggttacctattttcaagcaagacggaagaaatgcccatcagtttaagtttgctaacatcccaaatacattttttccctaggatacagggacaataaagttcttctttaccactcccaaaacaaaatcctaccaaaattgtgatcttctagatttgccctagtcagatatattgtccctcttacagtgccaaatttctcacacagaaatgtgcttcctcattttagaaaaacaatataaaagaccttatggaacataattaaaatatttaaatctgtcttaatctactatttagatactgtagacatctggtagaccctaaaagacatctaaaagaccccaatgttgttagggagaaactagcaacattcatgccagaacaaactcatgttagaaaacactgacttatttcttgttcaagggagctggtccccattttacagatcctgcaggaacttcagaaaatactgagcagtgctggatgttatcaatttaacagaacttgcctgtgcagggcactttctacttttcaaagcacatctattatctcgggaacttcacaaacctctagtgaggtaggcaggtcaggtattattccactttgcatgtgagaaatgaagattcacaggataaagtaaccagctcaaagccacagaattcttcaaagtgggttcaatttcatagtacaggctcccagatttgcatgtacatatatatgtacacaaacatgcagcctgacactgacgtacatgactcatgtttatgatgcaaacatcctagaataaaattagggaaacgttcaaatagtcccctgttgtcaatttcctctagttctactattaccctaagctgctctcgtttctctgttttaatacttggtaggctcccaagttatttctacttttatgctgatggaaaaaaacgcaccagactatctcatgtcacccactcctccacatctcccacttccaaacttctaagagcctagaaacacatcaaaggtaatgaatgactgagtaattcaaagattctcctcagtgaatgctcaaaggactgctgattttcatcaatagcacaaaggatattttgtagaaccttttccttgaatgtcaaggatattttattaagcttaagacatatccaggtaaagctagttcatcaaaggtttcactctcctaagtctacttgcgaggtcctccttcatcctacaccctgggcaagtccagcacatggcccatggtctcaaacctacagcaataagcgagctgctggcccttctgatctcagggacgagattcaaaattctaactaatagaatctaatattcatgtagattaactttatagtgccttgtactaggtaggttcccaacttcaagaattcaatagaatcaactgtttcacaaattagtatagcaaagtaatctctaaagaaagtttaggcattttagtttttaatcctaccagtgaattgaaacaccaatttcatttcccagtaacaatgtaatccttcactatttagatgataaaactttgtaagttttaaggggggggtgttacataaacacccccttatgaatctgataaaaactacagaccctatctttagaaaactacgcacttgacgcccacatacaattttacatacaatttcatggggttatgaaacccccagcacctacccatgaatcacaagttaagaatcctggtgtaaaaataaccaaaggtataaagttaggaaaggtgggaaaatgaaacataggaccaaaagaaaagttggaagaggatggaggagaggacaggagatgccgtagcagtgagtaactctggaagtgggtataggactacgtggctctgtacttcaaagtgctctcacttcttacatttcatttgatctttacagtaactcattcaacaaaatggatcagttgttatagcatacctccccccactccctgccaactttaaagagaaaaaaactaatacttgaattggttatacaagttgcccaaggtcaagtatcagcacacagcaaaaccaagacccagtcccaagtcctcaggttattctgtgtcataccattggctcctagggagagagggaattcaaaggaaacagaagaaagaaaaaagactggaaaggaagcccaggaaacagaaaggaactgggtgagaataatatgatataaaaagtgaaaagtgaagcaagagaatggagagggagatgaggatgtagtagagaaactaaaaggagaaataagaactttctgtcatcttaaatattattaaaaaaaactgtgcctccaacttctatctggttataaaaagagagtgaaaaattatcatctcaaatctcaaaacctagaaagctgtaggatacccaaccggattatgagaacagtaaagaaagaataaagtggaaaggggtaagggaaaacataaacgatgtcccaaataaagaagcagggtgaattactctggtgttctaggaaacacggtaggatgaagccctacagttagggcacaattaacacaagggcccttacacacagagccttgttagctctggacccaaaggggacagacagatggggtggttatttacagttatattttcctaaaattgaaactaaacaacaatctttgcttctaacattagccttccagagctggtgtggattattattttttaaaatttaatggttgtcaaaagcctgttttgggtaaagttgattcataaatgttgttttattaacttttctttctcttcacacaaaatgagaaatgtttaaatggttatccatggaaacagtaaagcagcttatgctccaatgggtcgacttcgtggaaaaaagaaaacaatatttccatggagtggcctcatgcctaacagaaaagacctcatttatgtttaaaaaaaaaaaaaaaatcctgcaagaaggagtagcagagggagcaacatcccaaagaccacatgcaacttccagaaagtaaaagtgactctgtccggagttccaatggatacatcacgggctccaaaagaggttctaaaaagcaaatttgcccggtagttgtccctctccataggctacagtttcctagagacaggaaagcagggtgcatcggcgtgcaggcttttcttggaaagtaacgaagcaacctggggctgagtttagagaccttatgggcaagaggtagaacatcagcatgtacaagattctgtttgccccattattgggttaccggagtgctgtagtaaaagcacaaaggacactgctgagaactggctggatcacactgtcagccaagaaaaggaaggacgaatgaggctgaagagactgcagggctgcagatgaaatatccagacctatgcatcctcatgtgggatgagtgggttccggcaaaatttaagaggctaatgatgggatggaggggttggcagcagcacagcatagcaggtaagtggcaccaagagacagacagcacaatgagtttccaccctctttctctgtacagttacctgttgcgccagaatttgcagtggtggggatcagaactgaaagctatatttcttcttcctctgcccactttttgctatgctactgacaggcagactttataccacatcttctacagccataggcaacttaggtattcctagagcaatatttctatacgtagcataaatgattgtgaaggcctgttggattttttgcatgaaacgtgtcggaatgtgttttgaaagctatttctcattactagccttacaaagtgcattaaacattcagaatcaccgttattctraaatatactttttacacagtacaaagaaagccaatctaatctgtccaggaaaaagggggaagaaactcttaagggagaaaatacctacaagaaatattaaagccagtgcaaccagatsagtatgagcaatttaattatttgatggcaacctttcactagtgtttcattttcagtagcgaatggtactgtgagcaattttggctcccccaaaaatgttttattttatttattttcagggccaccttctgaacagttgagaacagaacacttatgggcacaatttagaatatattaggtaaaacagaaacagacttaaaatactggcttgatcaataaaaagtgttaaataagaaaataagtgggtatttttgctttgttttgtgttgtttgcgcagaaatactgaattttttatcagaaagaggatacttaagaaggagctacctcccacatatgggttttcaaagaagaaactgaaatcatttctttgagaaaggtgtcgtaacacattgagatctcccatctgtctagtgtaattccagcctcagaaggctccacatagaatgctttcctaaaaaaatgtccactcttacaatgctgtctgggctattaytacacaggctttgtagttagaggatcactgattcaatttgtgccaagcgcaagggttctaagcattaaagaaagaccttggagattatccaatccaacttcctcacttttctttctttctttctttctttttttttctatatgagatgaagtttctctcttgctgccaggctggagtgcaatggcacagtctcggctcactgcaaccttcacctcccgggttcaagcgattctcctgcctctgcctcctgagtagctgggattacaggcatgtgccaccacgcccagctaattttgtatttttagtagagacagggtttctccatgttggtcaggctggtctcgaactcccaacctcaggtgatctgcctgccttggcctcccaaagtgctgggattacaggcgtgagccaccgcacctggccttcctcatttttcagaagagaaaaaaattacccagaaaagtaaagcaaccaagccagaggtccacattaggtgaaaacaggtttctcaacagtggcactactgatatgtttttgtactaggtacttatttgttgccaggtcctgtcctgtgcatcgcacgatgtttagcagcatccttggacagttgcaatccccctatccaattgtcacgataaaaaatgactctggacattgccaaatgtccttggggagaaggcagggaggacaaaactcccccagttgagaaccactgggttaacaactggcatgactggcaaccaaatccctctgactcccaaggtgctcttttcattaatgacacaaatacttcttgttttcgagtgcatattttggaactagggataactgattaatgcattaagccaccactaatactgactacatgtcaaatgatgtgattaaaaatatcttaaaaatctatcttacatatatggaatgtcaggcacacacagatgagtaaatgcacatattattagcatatatatatatacataagcctgaaaccgcagaatctaagaaacaatgagttatttttggttgggtaaaatatagtaatgccattgaaaagatagttcagggagaaatctatctacgaatggtaaactttcttaccagccttagagaaattcactacacattgtagctatatacagaatcatcttttaaaacacacacacacacacacaagaagggacctcattgtcaagttgtttaatcatcttattgtgaagataagaaaactccactcaaagagctaaagtttcctaaactaagtgcttcaaaatagtgccagattgcttctcagactcagatggaaaaaacagacttacaaaggacactcagtttctaccaccaagggcagcctctgatttcagagtgccagttaattataatattgagatattacctgtttctctttttccggtgttctctattagaattttctgattcactaccactgctggtgttacagcgtgaacgtgacctgaagacaaaaaggtaagaacaaaagaaaaaacacacatttataactcacgaacaatttcagaaaggtttatatgggtcctctggaattcattttgcagtaaaattatcaatccaaacatcaagagctgtattatccctctccaagtcagtgtttctgaactcagtaagacatctgactgagtctatagctcagggaaatggcaatgcaggggaaatataaaaaccgattaaggtgaatgtcagtatgttcccagaacggaccgcaaaatcaatcacttccaacagaactctgacatggcaaagccrtaagtcggtggtgsactaaatatggacacaaaatcttgtaaccctcccatccgccccactgagagacgtagagtttatttccctatcctctgaatttacactggtcttgtgactgattttaccaatagaatgaggtggaagggatactatgtcagttccaggactagccccttaaccgactggtagcttctgcttcctcccagcctaaagaagtgtaaaagaagtgtctacagaagtgtaagctagccaggtggagaaactatgcagagaggtcccaggcctccagcctttctgccaagatgccaacacgaaagagaaaggccccctggataacacaacctcagctgtcatctgaccacagcctcatgaaatcgtgaacaagacgagctaaaaagctgcctgttcaayggacagaattatactagataaatagagttgttgctgctttaagccactgagttctgcagtggtttataatatggcaacagataaataagacagctcctctgagacacaaaggagcaggaaacagcacagtcttaggatgcaacagaatggaagactgggaatcagctgaagacaaactggcttttgaaagtaaaaaaaataaaaaaaaataatgcccccgctctttccttaactctgagcatttctaaatctgctaacccttcttccctctgactgtccttccatttttgtttttttacctcctcctttgcttaagatctgaatcttcaccactgttatgggctttcctgtgaaaacaaatgaagacatttaagaaaacaggagattatcaattggctaaggaaagcacaccaaaatgagtttcacttcagttaacacatatttgtcatacattcattcatttgccaaacatttacgtcatatgtatatgcctaaccctacatacaacacgtcccagaaatataatgttaataacatcacctggcctcactctagtggaacctgcaaaccgtccgaattccattaatccaatgatgaggttagtctgcagtttcagaactgcaatcctccaagctgatttctgccatagtggaactgacatcatctcacttggatgccctttcccataccctgaggctccaaattctctttatctcttctctcataatctcctccacttcaactcagcaacctacctcatacttacgactttatcatctgyaaccacctccaaacactttgctctcttaccacaatctcctcttcctcctgtttaccactcgccatttactttcaaacagcttcaatggggcatcctggttaaaggtgctggctctagagccagacaacatgaatgtgaatcccatcttctccactgaygagttatgtgatttaaataagttacttttctactcagtgactcatttttaatagaatctcctttaaagtctcctctaaaggataaaacgaattaatayatttaaaatgcatacactaggacctgggccattgttagcactcaaccaagataagctgttattgcttattcaactatttccattcttccttttctttgaccccaataagactatctattgacctggctactctccaccrgctcttcacttctcttcactgtcttctgtactcagcttagatttcctaatccatcatttcaataacatgcatgctgatactcaacatgttcctcaactctgtttttcattccatctttttggcaaaatcccaggcatgggtgaatccaactatgcaagttttctggatcagtcctaaacagctggctgagcagtgctggaaggagtcacacaaaagcggtgtattacactacaaatccatgttcattaacttcaagtggggccacaccacggttcagcaatcctgccacttttcacagatctaagtacaaagtggtttcaaactctccaccctgcaaccctctgacccacagtactcctgtttcagcaaatgattttgttttctccttccgaaggaaaaagcagcctccagatgtaactctttcatcttcctgctaccaaaaataaaaacttaccaacatcttcctctctgttatttatggatttatccttactaccaaggttagtccctccaccagtgctttgtggtcccatcaccctgtgtcttttcaatgactttcattaactaccctcccacctctcacacagtcaccttgcccgtctagcagactctttttacaagctattaactttttcaagactctactgtttaaacaaacatagacctactttgagtccacatcccccctcatctgcccagtctctcctctctccttcaaagccaaacttttggagagtggtgtctatgccccatgctccatttccttacaatctgtaatctagcaccttcccattctgatctctttaacgtatggcttacgttactccatttcctccaacacacttatatcaaataacatgaacagcaatatgtggtctctgttcttacatccaattttggggtcactatttagcataaacacaattataccgaaattggtcacagacgatctaaatagtgttccaggaatatgattccattcttttgtaggttttaaattttctaagagaagatacttgcctaagttttccatgtacatatcacttgcttagggttcttttgcttatcactaattcttcaaactctgagagaacagcaaaactcctgctatggatggatactcaggtaatctgcaagttccatttatccctcctggagccctctgccctcctgctcatacctggacctttgactaactcccctttaccatgatccaaggaactccttttgcttcttgatatgatggaccctacatctccaggtcttttggctacttgtctgggttttggtaaagtgtatcttttagttgctaacagaaaaatttgcatgacagatacacttttttggaacccaaaatttctgaaaatgtctttattctatacaaacaattatggttatctgggcatagactcctaaactgaaaataatctttcagacttctgaaggcaatacttctttgccttcttcctctgatattactgttaagcagcccaatttttttttctttttttttgagacggagtttcactcttgtggcccaacctggagtacagtggtgcgatctcagctcactgcaacctccgccttccgggttcaagtgattttcctgcctcagcctccaccagtagctgggattacaggcatgcaccaccacgcctggctagtttgtatttttagtagagacagggtttcaccatgttgggtaggctagtcttgaacttctgacctcaggtgatcggcccacctcggcctctcaaagtgctgggattacaggcatgagccaccgtacatggctcccaatgtcattttgatttgtcacyatttgtacatggatatttttttctctcccatattcccatgccccctccaaatctttagaattctttgttaatctataatgttttgaaatttagttataatgaaccttcgaatgaatctaacttttcaaccgattatgtcaaatgcttagtgggttcttctctataatgtcacatccttcagttccggaatattcgctttgctgtttctttaatagtttcctctcctatgttttctctgttcttttttcttagaaattgtattagttgaatgtttgatatctaggtttgataattttattattcttatttccatacatttgttttattgtgggttttttggttccgttttggagaagattttcttaatgttaccttccaaatattttactcattttaaattctgccacactaattttaagcctaataactcttatttattagttcttacctttgtattgatagaaattcatggttatattttttcatctttctaaatwgttttttagaaatttttatttcttatattgtctgtttcctgtgagaatgcccccaaccccaccctacaccccatttgtttgttttagtctctgcctttctagacagaagcaatgctcaaatgcaggcgttcatggctctctcttcctattcaagcagtaagtgttaaaatgacyggagccctttggatggtgcagtgcacgttaattaatggcctcacagtaatatgagggcagcctcaatcatttcactggatgatcctttgaaagtaagtatatgtaagtcttttctcttgtacctagtccatttcctgcagtgrgattctctagtctcatgcctgggagatataaccgtttcaatggaagatgctttgaaagctagtatccatagtcttttctcttgtccctgtccatctcttacaaagggattctctaattttctgcctaggtaatataagcctggattctagtattctgggaatgaagagagaagggagacatttggtatgcaaattttcactctcttgatttttccatggccacaatctctctttctcctttaccagttaatcttcaattaagccaaatgctggagcttcttacaactctgtcattggctttgtctttttgcattctatctatactatccacctaaacaacctaatctctatatttcaagtaacatacttaagattatatttcggtccataaagcaaatcaagcccctgacttccattcacaacccatgtgaatcccacacttggacttctcagaagtaccataaattcaggatatcagaatctaaactggcaattgtccctttcaagcctgtgaagtcctgatgattctacttctacgcaacacatcgaattcaaaaaactgaacaagcctgggtttcattctggacagctccctctcctctacccctcatactgattctcctaccaattttacctctcactgrctactgaaaccatctacttctttatatttccacatcaccaccttggtccatgctcccattctctattgctaggactcggacaatagcctgctgcctggtcttctgctactacccactttcaccatttctccacaggacagtgagggtcatctgtacaaacacaaatgtgatgttattgtacttcctgtaaaaaaccactggtctaaggaccaaaatcctgaacaaagtccaggtgggctgtaagrtcwgatcccatctttctctctatgctcatttctaacacatttttattcactctcagagtctgataaacactggcctttttcgttttcatgaaggtttcctgcttctttccattcccagtgcttttgcacatgctagcccctctatctggtatgattgctcctttcttttagcctgtttgtatctcagatcctggcgcaagcatccaacctcaggaaactaaccccaacctctttggctcagtgattcagcaaacttcccctaacagtgctcattacacaggcatctatttataaaaatttatcatgcattacacttacgacacgtgtacttttctgtatgcatgctaggtttcaataaaaagtttttaaaattcccttaagtaccacatagcttaccttcatattatgtattaaagtcacaatggcacatatattcctatgactcatgtatttatcccttaacagcatctaagctcccaaaggacaacaactttgtctaatggcagcagcacactgcatggcatacaacaggcacccaaacattttttaatgtaaaattgaaagctgaggagtgaaaatatattgtactaccaggaaatatgctgactttctttttctagaataggaacgtttaaacaagcaggcttcagggtctccataaattttgaaaattatatgcagatgtttatatgtatttaaatatgaacctacctttccctaaggaatgaatccaacatttcaccagatctcagagggtagtaccacccaaaaaggttaaggaccactattctggactcggccagaatttgatagcttgtatccacctcatgataaacaaaataggaaattttgacatctattgcaaagtgtattatcctggtatccaaagcaaaatataatttcctattattaaatttaagtccttgagattcttccatgctgatgacatgtcttgattttaaatgccagtgttaatccagcaatgtagagatttgtgctgagtgcaaggtaaatatgtgtgaagataaaaaagactgacaaggacaacgacacttatagggcattcatactgggaagaaacagagaagaatgtgctttagtcctttttatgtcaacatgcagcaatggctcattgcctcaaaacacacgtccccaaaagagacctgtaagtgcatcaggcaaaaggctctatggatgctcaggcaaaaagatcctcttcccagcaaatttaaatagccttcccctggaatacgccaatgaaaggatcctgtatccactctccacaattacttctctgtgtttcacaggaagccagcggaaaatgaacctcagtgtagaagtcaagtctggatttgggagtgtatatgctgcaaactatttcaagcaattattttgtatgaaaatatgcaaatttagccatattttagcaaaatgtaattaagctcattttcaaatgtattaaaatgactatctgctcaacatgtgtgattattttatatagggagtgctgacaaattgcactaattaattaagggtagaaaactataaaactctatctacgaataatatatgctaaattctaatcatccctgccacctatgtcgcctcaacacacaatacacacaaatgcactttaaagtatttcccagtggtgttgctttggttttaagtattgtccaaattgaaccaactcttggtgttcccaaggagaatgctgagtaagggctgaagtacagtttatttaaatgagggctatcactatctccacctttttcagatgtacaggctgggattccaatcccatgtgtgccacagaggacaagctaccatcatctccctgagcctcagttttctcatctgtaaaactgagatggtgatggtgggctgaatatttttcattggtactcagcctctactgactcatctataatctactctctactgcagagatagaaagcctggaaattttatattcctggacactttgccagctgggttctagttaagagagactccagtkagatctgaaggcagagaacaggaaaagttattttccttctagttgtacctgtggcatcaactcttgcactcctgagaagtgggrgttctttgttcggctacagtggtggtatctccagcagtgtcagcaagagtggtccctgtctagcatccatcacggtgcctgcagcattgtcagcagcaagcacaggctcaggattgcctgctcaaaggtggaagcggcttctggtctccaggtaacacccacttctctctttgcattccttcagtccagaggcagtaaaagcagctagatctcttgagttacaccactctctgctttttgcaccttcaatcctacttatacctttgcaccaattccctacttaatccccctctgctagaatcacatcatgcctgaatacaaatgccatttcccaaagggttattattgggattacatgagataatatagagcaagcactttgctcagtacttggaatatggcaataccaaacaaatgcctactattaccctattattctgtctaatcattgttggacctgatctagcrccctcatgtcagtcctactacatgaaggtaatatagacccttctcttcttaaccatcaaaggatttcagtgaagttgaacttggtttcagaaagctgggggcaaagctctgggaaactagcagaagcaaaagggatcaagcaggaaaaggccagcaagtgtgtattaactagrgcataggtgaaagaagggcttggcttccaaacctgcagtgtgcacaaaaagagtcttgatggttacctgacatcatgaactgaaacttcttgtaaktataaaagtcatttaggctgggtgcagtgactcatgcctgtaatcccagcaatttgggagactgaggtgggaggactgcttgaggctaggaattcaagaccagcctgggcaacataacaagtgagaccccatctctactttaatttatacatttttatttttttaaaaaaggaaaaagaggccgggcgcggtgactcatgcctgtaatcccagcattttgggaggctgaggcagagggatcacgaggtcaggagttcgagaccawcgtggagaaaccctatccctactaaaaataaaaaaattagccgggcctgatggcgcatgcctgtaatcccagctactcagggggctgaggcaggagaatcgctcgaacccaggaggcagagtttgcagtgagccaagatcatgccactrcactccagcctgggcatcagagcgagactccatctcaaaaacaaaaacaaaaaccacaaaaaccaaaaaaaggaaaaagtcatttatacaatgccaattatgtaggtactcaaaataaaacacagtccctgccatgtaggagtgaaaagaatttcactgatgagtcatttctacatcttcctctcttgtacctgtcacactgcccagcctgctttgcagagaggtccaaaacttccagctaagaactttttaaattaagcatacacacacaaatattatcccttcaaacactctacccgtataggtaaaatgtaacaggattcatttttttctgtgctttaaaaggcgtttttcagctaaaaaggcttatctttaagtgtagttttgtcttctcaggtagaaacacttaatatgttttatatattaacatatactatctcgtctgggcgcagtggcttacacctgtaatcccagcactttgggaggccgaggcgggtggatcacctgaggttgggagttcgagaccagcctgaccaacatggaaaaacccctactaaaaatacaaaaaaatcagccgggcgtggcagcacatgcctgtaatctcagctactggggaggctgaggcaggagaatcgcttgaacccaggaggcggaggttgcagtgagctgagatcgtgccactgcactccagcctaggcaacaagagtgaaactccgtctcaaaaaaaaaaagatatactgtctctactttgtaatatactatatataatacatatttttattatatattatatactatttttagacacattattcataaatagaatacagaaagcaagttcctgccaatattttatgaaattattctctaaaactctggctgtttacgataaatacttcaggattcctaacttattttatgtcaaaaagagtaagctncttgttatcttggagagaaacagtaatgtcggtataagaatcacctattataaagtcaggcctgggacaaaatgcttctgttgaaagctgctaacagagagattgtgttccgcttacctcctcctcacaggctgtacagaatcattgtcacttccacaggaggggtttcggcgacgcgtgtaagggaactytggcgacttagtgcgatcactgggagaattgtagagtccactggagagaaagaaaaatggtcaaaaagagcccagagagttcctgggggaaaacacaccgcagcccagacctattcataactgcacagctggtacttccagaggcacatgcaccaggggcacgtggttctctttgctgacaagatttattaaaagaaaagaggtaagatctggcaaatcaaatcataaaggtcattattttgcaggaatgccatttgtctcactagccttcagtagtaaaaaatgaacacacacaaataacaataacaattcatacatatgatgaatttagccctttctaaacactgactcagctaaagactttacattcattatctcagctaatcttcatatcagccttcagcactgagatacaactattaaacctattaaacagaaaaaaaattgaaatatagactacttaattaagtggcccaaataaagtagctaggaagtggcagggctagaatttgaactataagttacaacacaggtctgtcactggtttggtagttgtgaccagagatacactagacatatccatatttttaggaataaaggtcttccagcataactattcatcasctatagtttttgacttaagtttttaaccaaaactatgaaatggggaaaattattaatatgccatttagagttttcagaaatatattaccttacaggcaatttcataatatttcctaggtttcccttttgcctttccaggaaaaagtttcatgttataaaacatactgttgatttccactttagaaatcccagcccctctccccctgggtcacattgatttagagtctgcccactttatccacagctagctgtgatcagccacccagcagctggattcctttattcaatgagctgcatgtactaaccccttttctactgtctcctttataaaaacaatgattccctttacctctgggggccattttcttcccacggtgcatgagatttgcttctttgggtatcagggctattttcattctttgctttcttaaagctttaattttaaaaaaaagtatgagaaataaattaagtagaaaataaaagtaaactcacatacttatttgttaagtaaaactttttaacaaatgttaagatgtgcacacttatttgcttgtttatacctgtgactctaaaaagaacatgaagtcgctgcccataaaatctgtctccagcaagtacctttgggtctttcccccctctttctttctagttttactgctttagtcaacagatgccaggtccatcaattgttaagaaactctagagtccacctgcaggagaggcagcaaggggaaccacagagccaagaaaataagaaagccaaggaggaaggacctgggctacccaggatcttcagcctggctccctttttacaacagtgatcagagaagcccttactccaggcacgggtctgaatccacacaggtcggtcagccccgggcaggttcaggctattcaaactgaccttttcctggcttccrccttatcttggcttcatccctccagatgagaatgactttcaaatgctatttcctgacctagtatcatctttcagtcctaagaatgtaaatgtaactgagttgttctaccctcaacaaattgttttagaaacccctggggagayatggaggaagggactaatcagaagcctccaggcaccagtggggaggggtgtgtcacctctcacatcctcaggagtcttagcttaagataaagatagagctatttaactccaaatccacttttaaccctggctttttgaggaatcctctgtataactgtcctaggatagggtcatagcggagtactttgtaacagccaacaaagaggagagaggaaagatgacgaggtattaaaaaaaaaaaaagacttgcaccctagtatactatccatgatggaattaaagtaagcctataaaattttgtatctgacagaggcatataacccatagtattagtagatggcagcttagtttattatttttataaaggctaaaaacctctacagattcaattcccaaagtaaaagcttaccttttgaaatgatgaaaattaacaaatatggcagatatttaatacgatagtagaaagtgtatgtgatcaataaatcagaaaaagcaaagagaagggagaagggagactggaaaagaaatagggagataaaagaggaactgagagagtatacaaaagttaaagaataataaaatcctgggtgacaagttaattgcattcacaccctaaggtatttctcatctgaagcttgagaggaaaactttggtggtgcttcaagtaccagtatcatcacaggaatgtggttgcaaaggggattgaaaaatattgttaaaatggccatacagcccaaagcaatatacagatgcaatgctattcctatcaaactaccaacatcattttttcacaggaaagaactattctaaaatggaccctccctccaaaaaagcccaaacagccaaagcaattctaagcagaaagaacaaagctggaggcatcacactacctgacttcaaactgtactacaaggctacagtaacaaaaacagcatggtatggtacaaaaactgacaaaaagaccaatgcaataggatagagaacccagaaacaaagtcatacacctacaaccatctgatcttcaacaaaagcaactagaacaagcaatggggaaaggactccctaaatggtgctgggatggccagtcatatgcagaagagtgaaactggacctcttccttttactatattcaaaaatccactcaagatagattaagaacttaaatgtaagacctcaaactatgaaaatacatcttagaagaaaacctaggaaatatcattctggacatcagccttggtgaagaatttataactaagtccccaaaagcaattgcaacaaaaccaaaaattgacaagtgagactttaaagagcttctgcacaacaaaagaaactatcaacagagtaaacagacaatctacagaaaaggagaaaatattcacaaactatgtatctgacaaaggtctaatatccagaatctataaggaacttcaacaattcaacaagatgaaacaaacaatgccattaaaaaatgggcaaaggacatcaacaggcacttttccaaagaagacatacatgcaaccaacaaatacatgaaaaaatgctcaacatcattaatcattcgaaaaaagcaaattaaaatcacaataagacaccatctccccagtcagaatacctattattaaaaagacaaaaaataaagatgttggcaagattgtggaaaaaagggaacacttttacactgttgggggaaatataaattagctcagccattgtggaaagcagtttggagatttctcaaagaacttaaaacagaaccaccatttgatccaacaattccactactggatatatactcaaagggaaacaaatcattctacaaaaaaagacatatggctgggcgcaatggctcacacctgtaatcccagcactttgggatgccaaggcaggcggatcccgaggtcaagagatgcagaccatcctggccaacctggtaaaaccccatctctaccaaacctacaaaaattagctgggagtggtggcacacgcctgtagtcccagctacttgggaggctgaggcaggagaatcgcttgaacccaggatgcggaggttgcagtgagtcaagatggtgccactccactccatcctggcaacagagggagactccatctcaaaaaaaaaaaaaaaaaaaagacacatacacttacatgctcattgcagcactattcacaatagcaaggacatagaatcagcctagatgaccatgaacagtggactggataaagcaaatatggaacatatacaccatggaatactacacagccataaaaaagaatgaaaccatgtcctttgcggcaacacggacgcaactggaggctattatcctaagttaattaacacagaaacagaaaactagatactgcatgttctcacttataagtgggaactaaacattgagtacacatggacataaagatgggaacaatagacactggggaccactagaggaggagagggggcaagggttgaaaactacctatcacgtactgtgctcactacctgagtgatgggatcatgcatacaccaaacctcagtgataaacaatttacccatgtgacaaacctactggcacacgtacccctggacctaaaataaaagttgaaaaaataaatttttaaaaggaggattgtactccttctgcacattctaaaaaagcgtgggatctgaatctcatggaagattcctgttcttatgctgaacataccacaagcataccctgtacatacagatgaagctgaatctctatccacagcttgagggtgactaagggaaatacagtaaactaaagttatgcaatgataaagaacttgtcatcctaaaaggagaaccagtaaatgtcttagaaccaaacaaaacataggcaaatccctgcgtaaaatattaaaactctgagaatcttcagatcttaaagttatcttgctgagaaattatgaactatactcctcgaagtagccacaatacagctgaatgaagccactattatttaccaaaaaaatatcaagtagatgatctaagaagtctttgcaggtcacatatctctgattgctgggatttccccatgatgtatggggggcaacccctatagagaaagtgagctcatgaaagctgctcattgttgtttataatgctgttccgtgaacataattggagagaagaaaaaatgactctgcaacagtgtcttaacagaaaacaaggcttagctctcagggaaacaatccatgtaatatattaagagaaggcttttccactggggaatgccccctgggaaagcagatgcagaggaccatgacaagtcttcatacatatgcaatcactgacttctgaggatctgatgcctctaaatgccataaaccctctttccagggctacagttcagtgcaccactataatgaacacagtacattaaacatgaatatcatctactttattttacaagtccctctgagttagtccattatatcatgccattttcaaaatcacaagaaatttttaattttctgcggagaatgcagaccacagacaatctgtgagttcaccttgtgacaaaaagagcactttcttcaaataagagagtcaggtcctgatgttttatatttcattggtgttttaatgtattatttggcccagagatttattggatcccatggatcaaaagtattcattaatcatcaaagttaaaagatttttaaccttgtctacagaaaaaaagcatttttacaacagcatataattgtacgtttcttcagttaacttcactgacctttttactggtgaaggtgcaataattttaattgttccttcattttctccattttccatgtttgcagttatcctactgatggtgtttgattctagcagaggaggagaaggaaagatggaagagagaggaaacagtgataaggaaatgaaagaaacagaagacttattttaaaatgcaattttagggacactgtggcacattttattgataaattataaccccaaataaataatgaatcacccaataaattggaggtactattttctaacgtgtactaaaccctcaacataacaatgtcctgggagtctaggctatttttttcagactttaaaactaagtctccacatctttagatgttaaaataacatacactttagactattaaaatgatattctgagatatttagtaccatatattagaatataaaacataatgatcaggttttgatgactacttgtgaagaagtttctcagcatatcatgacagtccccatttgaaatcaaaccaaacaaaaaacttcaaacctgaaaatatcccaactcataatgcagctgtcaaaaaaagagtaatatacatgtgatctgtatcactcacatataaaaaaaagacattttcaaatgtgttcttcatgcaaacattcctaaaaatctgaaactgaatttttaaaagttgttattccatagatttgcatacacgctagaggaaccagcagagggagcccatggcagacacaatgttggaagtcatgatcgaaataaagataactgaagggtctgggcccatgtaggaggtcaggcttccactctcagggcagaggtagataagcctgcagaagtgaggtgtgtgggctctgggaacaactcttctccagtgtgcatgtacctcactcaaggaggaggcagtttagatgatcaggggaaatcagcatgcacagatgcccacaggccctgttcaattaggtctatgtgccatacaggtgtgtcttcctcggagctactcctgcaggggtaatagttacggtccttcaatccaatgcataacggtcactaaccaccgagaatgtcatgaagatgagtttgtaacattaataagcactaatatttattgagtacttactatgtgtcaggtactattacaagcgcttcacatctatttactcatgtatcctcaaaataatcctatgaagtagatatcaatgttatctcattttaaaagatttaaaaaaaatgggcctttctcaaggtcccacagctcctgagtggtggggcaagctttgaagatgggcagtctggctccacagacttagctctgaaccacacactacttccacctgtggccccacaagcagctcaagagtcagtctagattaggagtcaactgggagagacagactcttaaaagggcaagtgggccaggcgcagtggctcacgcctgtcatcccagcactttgggaagccgaggcgggcggatcacgaggtcaggagttcaagaccactctggccaacaaggcaaaaccccatctctactaaaaatataaaaattagctgggcatggtggtgcatgcctgtaatcccagatactcaggaggctgaggcaggagaattgcttgaactgggacccgggaggtggaggttgtagtgagctgagattgcgccactacactccagccctggctacagagcgagactccgtctcaaaaaaaaaaaaaaaacccacacagcaagtgaaagtgatgttcaatgagaagaacacttcagagcaaggcaagaggacaagacaagagaaacacctgagcaccctcaaagttggcaagtttcctccagagcagttgggaagtatgtctggcttacccatcaggaaagataaacattaataaatacactttagacagagaaaacaaagggtggtttcacataagagttccaaaaactgttactctaaggcatttgacatgggattccatatctgaattgtgttcctattttggaatcttgaaatgaaaaggtgagcctgaagacacctgtggcacaaaaggtaagctcatgctggagccactaccaataactgagcaacatccagaagccaggaataagaaaagactaatgttagggtaaattctgcctggtgtgataaatggaacacaaccaattaattccctggaactactccacgtgccatcaaacgtcagcagtggccagtcaccatcttagtcaattttgccataaccatgtgaccattaacaaaatcacaagggcagattctcaaaattgcaggcaaagatttgggatgaagctgcttctcacaggtagaactccatgtggtacacgtctggggcagtggcagaagggactaattcatttaggtcctagacagtaggtgtgccctaccattagttgtttttttttttttttttctcctgagacagagtcttgctttgtcgcccatgctggagtgcagtgacatgatctcagctcactgcaacctctgcctcctcggttcaagcaattctcctgcctcacactcccaagtagctgggattacaggcgcatgacactgagtccagctaatttttttataattttagtagagacagggtttcaccatcttggccaggctggtctggaactcctgacctcaagtgatccacccaccttggcctcccaaagtgctgggattacaggtgtgagccactgtgcccagccccctaacattagtatttttaattgttcttaataacctttatttaaatgtggtggtattcttagcagatattactaatatttaatataaatgaaaaggagcttcatgtcctagggctgttttcctaggctgggagagggggccacagcagagagaccaatacccagtgtcaataacaccaactgaaaaaagctgagtaaaggtgaacatcctgttaaccaaggccctgagtaactagcttaagaaaagacctaggtttgctcccaccctcattctctttagactgactacttttttcttagtctaacaatcaattaccttaggaaaagtgcctaatcaccttcacctgtttcccttccatccaaaaattaacagagaaaaacagaatatttttaaaaagaaaaattgcaaactatgtttatatatttgcttaaagaaagcaatatttggtttttcacaatgtctgaat

SEQ ID NO: 94003 - DNA, 60814 bp, Homo sapiens
ttccatatgatttgattccatgcaatttaatttcattccattcgattccattccattccattttttccatttgattcgatttgattcaattccatgtgattcaattaaattcccttccattccattcctttccttccactccattccattccgctccactccactccactccattaaattccattccaccccatgccattccactcccatgcactccactcgacttcaccacgttggattcaattccatttgatgctgttcgaatccgttcaattcgattccattcatttccattcgattccactttttccattcatttcaattttattcgattcgattcaattcttttcaatttcatgtgattccattccattccattccactccactccactctactcctctctattccattccactccattccactctgttcaattccattccttcccattccattccattccattccactccactccactccaatccattccactccactccattcaactccattccaccgcattctattccactccactcctctccacttcatcgcattcctttcaattccaattgatgccatttgattgcattctatcgattccatttgattccatttttttccatttgattcgatttgatttgatttgattctattcgatgcaatttgattccatgtgattcgattcgattccattccattctattccacccatttcacaccattccattccactccactcctttccactccactccactccattccattccattttttcccatcccattccattccactccactccactccactcaactgcactccactccacttcattcaattcctttccactcctttccattccactccattccactccattccacttcatggcattccatttgattccattcgatgccattcgaatcttttcaattccattcgattccattttttccatttgatttgaatcgattcaatttgattctattccattcgtttccattccattccattccattccactccactccattccactccaatccactccatgccactccattccactccactgcactccactccactccattgaattccattccttcccattccattccattccactccagtctactccactccactccacttctctgcattccatttgattccattctacaccattttaatccatttgattagattccattcaattccatttttgcatttgattctatctgattcaattccattctatttgatttgattccctgcggattccattccattccatggctattcaaagtcgattgcattccattccattcatctccactctattccactccaatccactccactgcactccactccactcctttgaattccattctttcccattccattcctttccattccagtcatctccgttccactccactccattcaattccactccacaccattccactcaacaccactccacttcaccgccttccatttgattccatttgatgcccttcgaatgtacttgattcgattccgttcgattccatttggttccattttttccattcaattcgatttgattcaattccatgtgatttgattccattccattccattccgttccattccactccattcaattccattccattccactccattccattccattccattccattccactccactccattccactccaatccactccgtgccactccactccactccactgcattcagttcctttccttcccattccatttcattctactccattccactccactccacttcaccgcatttcattcgattccattctatgccattttaatccattcgattagattccattcaattccattttttccatttgattcaatttgattcaattccatttgatttgattcgattccatgtgattccattccattccatcccattccatgccattccattccattccattccattccgctccactctattccactgcaatccactccactccactccactgcactccactctactgcactccattcaattccatttcttccctttccattcctttccattccagtcccctccattccactccatgccaattcattcaattccattccacaccattccactcaacaccactccacttcaccaccttccatttgattccattcgatgccgttggaatccactcgattcgattccctttggttccattttttccatttaattcgatttgattcaattccatgtgattagatttcattccattccattctgttccattccactccattccatttcattccattccactccactccactccaatccactccatgtcactccactccattccactccattcaattccattccaccccattccattccactccattccactccactccacttcatcacattccagtcaattccattcgatgccattcgaatccattcaattcagttacctttgattccattcaattcccttttttccattcgattccattcgatttgattgaattccatgtgattcgattccatcagatttgattccattccattccactccactccattccgttccattccattccattccattccattccactccactccactccattccactccactccactttactccaataaattccattccattactctccactcctttctattccattccactccactccattccatttgattccactccactatggtccattccaatccactccactccattccactgctctacattccactccattccactccactccactctgttccattccattccttcctattccattccatttcactctggtccgcttcactccactccattcaattccattccaccccattctattccactccattccacttccccacattgcattcacttccattcgtactccactctacttccccgcattgcattcgattccattcgatgccgttcgaatttgttgaattctagtcctttcatttccattcagttccattttttccattcgttttgtttcaattcaccaccttccatttgattccatttgaagccatttgaatgcacttgtttcgattccattcaattccattcggttccattttttccatccaattcgattcaattcaattccatgcaattcccttccattccattccactccactctactccactctactcctctccgttcaattccattccttcccattcctttccattctactccagtccactccactccactccattcaattctattccactgcattccattccattccattgctctccattccactccacttcaacacattccattcgattccatttgatgccattcgaattcattcgatcatttccatttgattccatttttttccacttgattcgatttgatttggttccttgtgattcgattccattccattccattccagttcattccattccattccatttcactccactccattccactccaatccattctactactctccactccactcccctgcactccactctactccactccactccattcaattccattccttcccattccattctattccactccagttccctccacagcactcccctccactccattcaattccattccacccctttccattccactccattccactccactccacttctccgcattccattcaattccattcgatgcaattcgaatccattcgatttgattacattcgattccatttgattccactttttccattcgattcaattagattcaatttgatttgattcgactcaattccatgtgattcgattccattccattcctttccattccactccattgcattccattccattccactccattccactccactccattccattccaatccattccattccattccactacattccactccactccattccattccactccactcctttccattccactccattccactgcgctccattcctctccactccatcgtattccattttttcccattccattccattccactcctttccactctgctccactccactcctctccattcaattctattccaccccattcctttccactccattctactccactccacttcactgtattccatttgatttcattcaatgccattcgaatccatttgattcgattccattcgattccatttgatttcatttttatgtatggtagatatacataaaatatatatgtttgaatatacatcaatttctatgtaataaacatgtatatcgccgttatgttttgccagacagtgatcaaagcactttcttcccaaagatagatgaattctactgttctcccaaatatttgttagcttctaaaatatacacattttgctatcatatataccaggttggtgggcaggtgtggtgtttcatgcctgtaatcccaggactttggaagggaggccatgacattaagattgcttgaattcaggagttaaaggccagcctggggaacatagagaaaccccatctctacaaaaattggctcagcgcagtggggtggacctgtagtcccaactacttgagaggttgagatgggaggatgtcttgccattactagaatggacaaagtcacaggagggcaggttggaagaggcagaggttgcaatgagccaagaccacaccactgcactccaacctgggtgatagaatgagaccctgtctcaaaaaataatgataataataataactccgggtgttgaaagagaaggagtaaaccccaacttattaaattatctgctctgaagctcagaaagagcattaaataccaagtgagtaagaactggtcaaagcgaaaacaagcatcacaggagggttatctaatgtgggtgctggggccacagccaggagctcgcagcaggttcatcatccaccttcacaggatggaaggcagcgtttcaggggttccaggtggccagatgcagtggtaagagcttggaaagttaagtttttggtttcataaaattgaattggtttgctaagatttggcctcatcatcagcttctgactctgaagattgcattgaacaatgataaaggccttttaggagattaagaacattcaagtacagttccatgatgttctggtccctgtaggggaaaattagttccattttagtgatcgccttaaactggagatatggggtgtcgggtgagaagaacagtttggatacagctgacctccacccctgggcccactcttacccatacgcacatcctcaaggcagctcagagcaacatcatagaatttgaaaggacacaggtgtgggctcatgggacatgttccatttccgccaatccctttggcaccacttaggatctgttaacataatggttaccatttcctaagtgtcaggccctcagccgagttttccacatgcagtacttaattctctcagactcaaatcattctgattccaacgtccagattcttaaccagtacaccatagtgcagcatggtagattatacaaagcaaaggatctggaatttgtaaggcttagctttgaattcttgcttattctttctagtgctgtgagtttgggaaagtaacttaacttctttgtgtcactttcctcatgagtaaaatggaaataataatatctgcccatcagtgttgtggctattccatctaataaatataaagaacttagggattgtccttacctgcaaaacaaattataacgaggttacagggtaggcatgtgtcctccatgccttacttgtgattagatgacttgtaccatttgatatttcaaacccaaaggggcctgttccctggggaagtttgccccaaaataactttcaatttagcagtgaatttctcactcattttatgatgaaacagccggactgtagaccgagcttgagtatccaagcagaggctggaatgtagattcttatatgtgcatggctcatacattttgacccttcttggaagagattaaagatgttaagcttagttacatcatggttttatctaatggaagaaaattaagatgtcaaaatttgttacattatattagtttctgttctaaggcctggtaaaaatacttttattatagtctaaaattattgacctttgtaagtgcccagccacacagtgtgatatacaaaaaagagtgtggctgacacaggcgtgatatttggcctcctggggactcctttgcaaaggcggacctgctaactagaacaggcaggaaggctactgagtaggaagaaacattagtctacaccaagtacaattagatagttgtcctgatcatcaaactcagagcaagcatacatgcctttgagggttttgtaaaactgagtaaatccaagagaggatgagaaggagttccatgcacagtcaaggggacagtgtctgacatcctcccagtcagtgctaggtggtccccagtcctggtgtctccccaccaggcacactctaacaattcattgcaggcagcgtagcccagattactgagaaactccaggatgcaccttcgcctcatcttgggtggctggccagacagggattccaggaatcctacccactggccagcaaggtattcatttgcaggatggcaaaagattctgtctccaggaggatgctgacctgctgatttggggagactcaaatttcttatattaacaagaactccatgaaaaattttccctggcaccctacccaccctagggacagccaagcttgcagaaaatccaggtgtggacaatgttttcaaataagttagatttttttttaaatttttcaatttggtctcttccctggattattgattacaaataattaaatatttttgccttattattgtcacatgtttaatatcttactgtttattatatgtctggggttttttttttcttaattttcaaatattcaaagcctcctgccttttcctgagtgagggagtgatgaaaacagtctgttggaaagattaattagataatagagataacagagagtagtggagaaaacttgattctggaagaaccaaggcacacagaaatgaggagctagatgagggctgtgtagagagggggaaagccacagagatgtccccaggaggaaatgccaagtcctgagagccgataggagagaaggactattctggaatcgtttccagccaacatggcacgaaggaggcatcaaagctcagaacatgaaaggggtgattttccagctgtcttaacaacagctatattgcctctgctaattcagtgttggtaagacttcaggtggcttctattccagttggacatgaatgaaccacctaaccgtgggactggtgcattttatcacatgacattggctctccattgcaaaagtgacaccagggttgggaatttgaggggcatgatacaaattcaaggaaattcaaataaatacgcaaaatcatttgaatttgtccttgtacctgcaaatgtagtccatgtggtctcatcagaagtatggatttttttcttcttcaggtcattgtatttcagacatacacaaataaaagtcatgtgcccattgaggcaaaatatatctttcctttggatgacaaggccgctgtgtgttgctttgaaggtcatcagtgggaagtacatagttggagaggtaaggcagagatcatgcctgctctctgctttcaaagtcagcttccatttcccagaacctttgttttcagagtccccatggctataaggttgagtagcagccttgtcataaaacgagaatattcttcgaagaaccagttcttgcacagtaagccttcctcaaacatccctccctgatgaagtgtttctatccctatctatccagtcttcatcatcagtgtcttgcacactctttgccttggcactgtaagagtgatttcagtatgaaaagtttaagagggccgggtgcagtggctcatgcctctaatctcagcactttgggaggctgaggcaggaggatcactcaaggtcaggagttcgagaccagcctggcaaacatggcaaaaccctatctctactaaaaatacaaaaattagtcagatgtggtggtgcacgcctgtaatcccatctacttgggaggctgaggcaggagaatttcttgaacctgggaggtggaggttgcagtgagccgagattgcaccactgcactccagcctgggcaacagagtgagactccatctcagaaaaaaaataaaaagaaaagtttaagagaggcacattggaaaattggttaggtccttatatatttttgtaaaacctgaccctcggcatcctgctataaaagtcaagctgaaatgaaaactattgtaactttctaaaaaaaataaaaaagaaagaaaagaaacaacagtttattaattctttgtatattgtaaggattatcccacagttacaattataaactataatttactaaatttaaagtaattattattttttgttcaacataaactcccaaccaaaaaaaatttctttcactattgattctaaaatatattgatcccaactgaaagagacttctctttagttggcctttcctggttcaaattcttatcagataagtatattttgatggtcactttaagtttccattcatcttagactcagtttttaggttttgcctgggttttaataaacattgatgttgttttcttcattaaagcctgaagtcactcttcatgtaaggaatgatttaaaaatcatcttttccagattaaagagaaggaagaagcccagtcagagtaccgaggagcagtgacccagggccatggcgcttacctgatgagtcaggatgctccagtatggcttggtgtgcatgctgcgtgcatacaggagaggaaaagagagttagaacaagatatgaaatacgaatttcatcctagaagctgagaaaatttacactgttgtgggacccagacttccacttgctctaagtaaggggaagccatgacagtcagacccatttgacttacctgaacaaaggaggaaacggcatcaatagttccagacaaacaggaagagctaggcctgtcattgggaactgagtttcccagaaggaatgacagacaaaaagataacatttgagatatgtaactttcatcttctgataagagtgatatattggccgtgcacaatggctcacacctgtaatctgagcactttgggaggctgagacgggcagatcccgtgaggtcaggaattcgagaccagcctggccaacatggtgaaaccccgtctgtactaatagtacaaaaattagctgggtgtggtggcaggcacctgtaatcccagctactggagaggctgcaacaggagaacctcttaaaactggggggcagagtttgaagtgaggcaaaattgcaccattgcactccagcctggatgacaagagcgaaacatcgtctcaaaaaaaaaaaaaaaaaaaaaaaaaaaaaaaaagaagaagaagaagaagaatagtgtgatatatttacaatttccctggaagtaagctcacctagcagatggtccaaacataaagaagggaggcatccctgccgggtcctgtgtgggccctgctcctgtgcttttaggtgattagatttagcagggacatgacctggacagcgtggaagagggaacagctggcaggtccactggactacttttcttaaatatcaggtgttttcacgaggcttctggcaggtgctagattgcgtgtagtcagcgtctaactctagtgcagatattttagttgtttttgcagatggggccttatgtttgagtatcacctctgggggagacaaatgacaatggtgttttgaaaatttaatgtttgctggagctaggggcatattcaagattaatatagatcgaaggggtaaattattgctcttgacatctaagatatccacttgcacgacgggaataggcaatgaagaggtgattattgaacagttaacaatgctgactctatgtatggacaaactgtatgtatagaagcctggggttcattatcaggttatcctcctatgtgagttggtaaatgtttcctcctaaatacctatgtatttccctaggaatatggtccataagacaacagtcttcacaaaagatattacctatgggtaaagtctgatcaaaactattgctaacccaagaattcaggtctcccagaatgcatttgacatcttgtgactataatgttctcctatcataatatatggtattcactttgggaggccaaagaaggaggagcacttcagcccaggaggttgtagtgagccatggtcgggccactgcactccagcctgagtgactgagcaagaccctatctttaaacataaacaaagttttgaaaaaagtaaggcgtgtgatggggagtctgggtgtgcagtgggggagcctgcttcaagaggagactgtgccggttagcagtgcccatgcctggaggggctgggatccattctgcttttctgtcaagtttttgggatctttctaagtgtttctccctcatcttccaagcatgtgtttgcaatttcaaactctagtaaagtgagcttcccgggatagagaccatcaggcgtcctccctggcgtgagtcctcgtcctctgagagccgccctgaaggagcacaggaagactccagcctgccttgctaatggatggaagctgtaactaccaataacccatgttagggatcttttagtcaatgttatgatcatcaccaattaatatggaggttaaagacaaatccagtctttatccataggttgaaaaacatcttggaaattattttcataagctctttttctgaaaaataattgatgttttctttaatacttcaggaggaactcctttaagcaaggagttcttgatagttgtagaattattttagagagaaaagtaatagggcatttgtcatttaaatgtcagagatgctctttgctagagtgagagttgcttccttatgccttttgctatgttgatgtgtatcagattttaagaggtagactttattcactctttgccagctctaggcctttgggatcagatttaggtaatattgttacttatggaaattaagttgatatctttgtcagcattctgataccttatagggttgtttttagcgtcatttactccctccctcaggaattgaaagtcaagattttcaacttttttctatttgaaggataagtcagtcctctgatggatgggagcttaaattagccaaactttcagatctttcctcctattatcactttctctgtttaacctcagctacacttgagtacattcttccccatgtcttgtctctcatgttgagttgtgagatttctcaacactgttaacatgtacttcaaaaatatttctccaatatcttcaaaattaaaacaggtgaaatgcaatcagttctacagcaaatcgtcacatcctaaggattttttcccagtgtagtgccggagtatttgaatattttaatgcaaaatccaaacatagttggagaaaagagatatgttttttaaacatctggttttatgtgtacatgcggaaatctcacattcttccaaggctaagaaataggaacatctgtgtttccttgagtgagaggggaggcgcaaagaggcaagcgctgccgcagttgtgagccctgactcaggactgcaccagcgggaatacaggagttcttcaggtcaatctcccagctcatagtttgatttctgccttaaaaatcatggactgattttttaaaagtgaattattaaatatgttttgctgaaattaattttctttattataaaatttaccattttaaccttttttaagtgtacaatttagtgctgttagctacattcacaattctgtgcaaccatcaccatcttcaaactatttcatcagcccaaacagaaactatgtacccattaaacagtaactccacattccctcctacacccagtgcctgctaccacgactctactttctgtctctatgactttgccttttctgagtatctcatataagtggagtaataggacattgtccctttatgtctggcttatttcacttaacatgatgtttttaacgtccatctacgttgaagcatgtgtcagaatttcccttctttttaaagctgaataatattccattgcctggatagaccacattttgcttatccattcatctgtcggtggacacttgggttgtttctgtcctttggctattgtgaataatgcagctatgagcattggtatgcaagtgtctgtttgagtctgctttcaattctggatatatgtgtagtgtgggattgctgtatcatatggtcactctatctttagttttttttgggaattgccatgttgtcttccatagcagctgcatcattttacattcccaccaccaatgcacctggattccagtttttctacatcctcaccaacactcatcattccggttttttctatattgattgaagtcaaccagcttttctttggtttgttttggtttttgagacacggtgtcacttggtcatctaggctggagtgcagtggtgcaatcatagctcaccacagcctcgacttcctgagcccaagcaatcctcccacctcagcctccagagtagctggaactacaggggtatgccaccactttttttcctattgttttttatttctctgtttggtttttgtttgttgttggtattttttgagacagtgtatcactttgtcacccaagctggaatggagtggtgcaatcttggctcactgcagccctgacatctgggtctcaagccatcctcctgcctcagccctccaagtaggtgggactacaggcccacaccaccacacccagctaattttttgtagagacagcatttcaccatggacccaggctggtctcaaatcccaagctcaagcaatctgcttgccttggcctcccaaaggggctggtattgcaggcatgagccactctgcccagccaccacttgttttttaataacagccatcccactgggtgtgaaatgggatctcgcagtggttctgatttacacttccctaatgactagtgacatcaagcatctttgcatgcacttgctggcttttgtgtatcttctttggagaaatatcaagtactggaatctactcataccaaggttgcatattagtaattagctaaagacataatttcaggatgctttgtaaatgtaaaggatgggatcatgctattatttaaaattctagctgggcattgtgactcatgcctataaccccagaactttgggaggctgaggcgggtggatcacctgaggtcaggagttcaagaacagcctgggcaacatggtgaaaccccatctctactaaaaatacaaaaattatccaggtggggtggcacatgcctgtagtgccagctacttgggaggctgaggcaggaaaatcacttcaacctgggagggggaggttgcagtgagccgagattgtgccagtggactacagcctaggtgacaggcaagactccatctcaaaatagaataaataaatgaagtaaaataaaataaaattctgtttaaaatcttttcgggaaaatacccagtagcaggagggagagaaaataccatagagttataaaattcccgaaggatagaatgtatattttattttaaatgtgaagtaactattttctggatggagcattgaaagagaaataattccttttttataaatagatagaagaccaaatgaccaggttatgttctccgaattgccactctgtctccgtcaaatggtagcaactcaacacagatgtgcccgcggccctgcaggccccagcccaggtgccgtcgttgtttcacaatgattgactccttgtctatggattcattcctcactgcacacaggtaagaaggagcagagtttgttattctatgggaagaccaatatattttgctatttttttctgtcttcttccctccccttctcaccaacagattttcttcttctgagaacacagctggtggttagccagggctttggggaggcttctagtttttattgaaaggggagaggaaatcactaaaagaatttctgttaaacgaagacactgcagagcggaaaggctaatgaggatttttttttcccatttcaggcaactctgtgtgcactaatttgagaaagaatttttgtacaatagtgtcgactattgagcttcagaagacaactggaactttaagattcaaaacctaaactatcgacccattgtttgaaagttatgattttatatttccaaatataatgctctatgtcaagcttgtccaacccacaacccagggcagctttgaatgcgacccaacacaaattcgtaaactttcttaaaacattatgaaaatgttttgcaagttttttttcagctcatcagctatcattagtgttagtgtatttcatgtgtcacacaagataattcttcttcttccattgtggcccagggaaaccaaaagattggatcccctgctgtctgtacttcctttgttgatttcctgtgttgaaatttcattacacgatgtggagatgggccatctgtacaaatgagcttactttccttctgtttctaatgcagcacttcttcatctgaggtagttgggtttaggtgtgtctatatgggcatcagtgggtggcaattctgcagttaaatatggcatttatgcttggaaatttttctagagaggttctcaaagatgttcatgactcaataaaagttacatgccaccagggtgcgggccctgcgggacgggacgagggcggggcgcatgccgcgagcacccgcctccccgcgctctgctggcctccacaccctggggccgcctttcctttcgcaggggcagcggggtgtcctggaagccccggagcttcatggaagcctgggagggcggcggagtggggtccgcagcgcggtgcccagagaggcagccggcgcccgaatccagggtgcacttccaagcggcgaggttcatcatggaggcaagtgtcaagctaggggtgcagtccattcccattgccactgcttgcaccatttaccataaattcttctgcgagacctgactggacgcctgtgacccttacctgattaccatgtcttccatttacttggccggcaaagtggaagagcagcacctgcggactcgtgacatcatcaatgtgtccaacaggtacttaaacccaagcgatgagcccctggaattggactccctcttctgggagcttagggacagcattgtgcagtgtcagcttctcatgctgagagttctgcgcttccaagtctccttccagcatccacacaagtacctgctccactacctggtttccctcaagaactggctgaaccgccatacctggcagcggacccccgttgccgtcactgcctgggccctgctgcaggacacctaccacggggggctgtgcctccacttccaggcccagcacatcaccgtggcagtgctctacctggccctgcaggtctgcggagttgaggtgcccgctgaggtcgaggctgagaagccgtggtggcaggagtttggtgacgaccttaccaatcattgacaatattgtgtctgatctcattcagatttataccacggactcagagatcccctaaggccctggcctaggcctgcccaaagagaagcctaggatgatcagctgcctggggaaattgccaccatgtcaccacgatggctggtcctcagaggaccagctgggaggactggttgtgctgctggagaagggctggagaaggcgatagcatgctgccgctttgacagtccctagcagtcgtggtccaggtgatggtgggagctgggcctccagcgggcaggcccggagtgcactgtgtgcagctgatccaaggcagccacatctgcttttgtcctttgagaggaatctgactacaatacaggcatgacatcaatgaaaggaaaatcatgaaatcgatgagactgaatccctagggatttttttatagccagatttatagcaagaatgaatgtgcaatgtggctgaaatctattttgtgtaataaaaggtgatgcaagtcaaaaaaaagttacatgcccactggtctactgatgctacttagaaatattagttataaagtactggactaagagtagatcatattgtatattgaggatgtgggttttttccgtgttttgattaaaaccaaatgaattatgaaagaaaaaattcctgtttcccccacagtcacaccatttctagtttccagatatgtgtttttcccaaccaattctctgacaccagttgcatgtcctacaatttaattcagttctgacattagctgcctggggttggcacagatctcacagggtgagggcccagtcccacaagactgctccccactccagaaaccagtagcaagtaccaggtccccaggttacccacacttctggtcagctccaagacagtgttcccacaaccctttctcaggttcagtaatttcctgtagcaactcacagaactcaggaaacctttacttaatacttaatacttaataattagtattactgatttattgcaaagaatattataaaggatacaaatgaacagccagatgaagaggtatatagggtaaggcccagaatagtcccaagcacaggagcttctgtctaacatacaattggggtgcaccatcctcctggcacatgaatgctgacccagaagctccctcaacccctttagatggggtttttaatgcaggtttcattacaaagtcctggttgattaaatcattggctgttggtgatttactctcccctccctggagattggggagtggggcagaaagttccagccctctaatcatatggttggctcccctgctaccagccctcaccatgggactttctaaaagtcacctcattaacataaactcaggtgtggttgaagtgtcctgttaggaataacaaatacatacatttcttatgtctgtagggaagttcaaactttccctctgaagtttccacctttggtctataaaataatccaacaatagatgaacagggcaaacgacatgcagatgtcgttacgtgtgcaggggccacatgagactcaaagaagggccagatgagtgaagtttcataccatacagaggtgggtagattgtcaggctcctggggggaagtggggacacgttgtgggagggtgaggggaggaaacatgtggtgagcaaaggctttcttctgatgcagatgaagtctggcaggcagcagacctgagagaatagaagcacttctggtaacagtttctctatcatctctttaaatatcagactttagcctcctcttcctgggagttcatctttcctaaatctggataaggcagataagggggtctcagagaaagcctatttgcacctgctgtttacttcactgacataagattcctctgcagatgcaaatattccctacaaatggactgcttttcagagctattcctgtgtctgctgtccctctgaaagcatctcaaaatatgccaaataagtctctttcggggtggcctatttttacctttttgtatatcacaatattgcaaattattaccaagaagcaacatttggactggtactgaatccactatagtttagcctatatatgccatttatgtagtttttttattcaaaggagtattagtataaccaggtaaaccatttcccagacattgctggtttttttctcaaaaatgtgtagcttacttttcatcactatatcagtatattgacttattagttgccagtgacttatgtatagaacttaagctcaatattgctttaaaaaatagatctttatgggtactgataagggagaataaattaaaagtgtacttttaaaattagatctaagggggaaagaaggtaaaataattttacctgggaacaggtaattttccatgaagtcacagcaagttgtacttcctctgtgagaaacacccctatcaatgacaaaattacaagggttggaatgaaggagagttccatctctcagttgttggagaggaagcacctggtggtgcacattgtgccgtcctcaccctgcagagtgcagatcatgttcatggatgggcatcccagcaccaaggtagctcttcctatggtagaaaagaagttttcatttttttaaataaaatgaattggcaaaatggccttttatagaaaaagcaaaactctagggacagaaagcagatgaggagctgccagagctggaggaagctacacagggacacagaggaacctttcaaggtaaagagaatattctgtcttcacttcaacagtggtcatgcaactgtatacatcccttaagatcatcaaactatatatttaagaggagtgcattttactgtatgtaggttataccttcatttttaaaatgattttctttgcaagtcttttattagaagccaagtggatctttttttttcctttgctacttaaacacagatgattgacaagctggcaacccgagctctaatcagagattacaaagatggcattcttcatgaaaatgaaaccagtcgtgaggtttgttcttttcattgtaaaaactattagacattgttcttaagcattcttacattgatttatctgtggaaatagaaagtgaggtcagctgcatggagaaggagactgtggtgtcagggcattcatcactgtatctgtgacactgtgcctgggatgtgtggtgtgtggtaaatgtttgttgaatgaattaacaaaagagtggatgtcagtggtttctggaaaattctgtaatgttttgtttatcagaaaaaaaccaaggagggctcagagagcactcagtgagtgcctgtagtggacgtcacctcagatctctcatgtggtagcattagtattcccatcttactgatgagagtcctgagtgcgaaatgctgagtgacctgccaaagcccacctgactccccgatgctgtgcagaccacggcctccgcagaggatcccctcacccaggccacagggactgcccagctgttctctcagggatgagatcttcaacaacgctgtgagtgttagtcctcaatgccatccccacaagaaggtgccagcgtgacagcaggccctggagacccccacagacagttctagtgacagatggtcacctggtggtctccctattctactcagatgcccctgggttggcagcttctctgtgatgttttgtttaagacccttttgtcctgaacaagtcattctgtctttccaattcttcagctttaaattgggagccacagactgtgaaagaatgagaaagcccactgcccaggagagctctctgtgaactacagggagctgaataatgaagagtgacattttctatggctaagtcagttgatctcattttaaagggaatattgagccacctatttagatgggacctacaattcaatatttagtctgaaatacaaatcttaaaatgatttactgaagtatctaaatagaaataaacaaaacaggacatgacttatattttattctatcctggatgaagaaacaaaccttgaaatctctgattattaaacccagtaaagaaaactctctcataatacaatttacaagctttgtggcagttgagaaaagggtatgtattattgttaattcaaggttatattattttatttatatttccacattaagaaagtcactcttgctttgacggttaatgacaacacccacaccctgggcctgtgaagcgtgggttgctgacaggccagtaggccccatgagtcccaacctcccattcatgggcagtttcagtgttgggacttatggtgatctttctaaatgagttgggtatgttatcatttttaatgttatagttattattaataattagctaatgtgtatttttcagataccctataattttgttacagttttggcatttattgtcttttattaatccaagatcgtcaaaaaatagaaaaggcctgggttctctgagagccccttcccccttcataagtttaaggggaaaattcacataatatgcccagcmcagtggccagcacctgccagtgctctgtaaagaggaaagtcactccacctccccactttccctcacgcttgtggcccaaggcccaagctccagtcccacacaccagcataaaagccaacacccataggctttagaatgtgtgattatcatttaattggataatgtctgtttgatttaatctatttgtgattcgatataggatgagaatgagtcaccttttcctgatattccaaaagtttctgaacttattaccaaagaagatgtagacttcctgccctacatgagctggcagggggagcaccaaggagccatcaggaaccaagtaaatgctgattaccaaataagttgatattgagctttgtttgttcatgaagatgaagggaaccctttgctaaaatagctcccttcttacctgtatatgaagaagttgttgtatccctgatgatggaaaatattcatgcatttataaaatgttgaattacatcatgttgcattacagagacttcacaatgtatgaacggagctgtatagtacaaaaagagaacacctgtggctgtgcttctatcatgggcaaatagattttcatacaggaagctaaagtcatctaggtagtgtaataggtttgtcataaaattatcaatagaagtgctatatctaatagatcaatagaactgctaataatctaaattcaccaccaatatttcttaaagtttatagtgctttagactgtggcccttatgaccagaaatacaatagaaatggaaaaatgtggcttaaataaaaattggaaacaaattgaaaagcaaagaaactgttttgttaacagtgccgataacactcttaggtctctaggttaaaaaactaaaatttccaaaatgtaagaatttaaaatctaactgggcaccatggttcattactgtaatcgaagcactttgggaagctgaggtgggaaaaatcacctcaacccaggagtttgagaccagcctgggcaacaaagtgagaactcatctctacaaaaagttttttaggctgggtgcagtggctcatgcttgtaatcccagcactttgggaggccgaagaagcagattgcttgagcccagaagttcaagaccagcctggggaaaatgctgaaaccccatctctccaaaaaaaagtacaaaaattagctgggcatggtggtgcatgcctgcaatcccagctactcaagaggctgtggcaggaagatgcttgaacccaggaggcagaggttgcagtgagccaaaatggcacccctacactccagcctgggtaacagagtgaggatttgatcataaataagaaaataacatacgaaagatgtgcaaccttgttactaaaagaatttaaaatataaaaactgtcatgagattcctttttattatttaactctgtcaggttggcaaatatcataaaaggtagatgactgaaagtcagtaaatacagtggttaagatcacaggtgctgtggctgagtgctcaggtctgaaccccagcccgcacttcgctctgttggacttgaccttcccagtgccccagtcctaatgcccgagtggggagagcagaaaaatccacctcaggtgattgtaaagagttctgagaccattataacatgtctagcttgtggatatttgataaatattagctgtagttattaattcacaaaggtgtctgaaacagacactgttgcccaaacagatggggcagaaagctgacaagtggtcttgggtttggagggatacttgctttttcttcttttttttaaatcttaactttttttttttttttttgagatggagtctcactctgtcacccaggctggagggcagtggcatgatgtcgactcactgccacctctgcctcctgggttcaagtgattctcatgcctctgtctcctgattagctgagattacacttgtgtgccaccacacccagctaatttttgtatttttagtagagacagggtttcaccatgttggccaggctagtctcgaactcctgacctcaagtgatccacctgccttggccttccaaagtgctcagatttcaggcatgagccaccgcccctggccttactttcttacagtgcacccttttgtatattttgaattttgaaccattggcatggattgcccatgaaagaaaaataatactttaagcaaacacaaacaaatagtttggggagtcaggaggagtaggaagttcattgttttggaaaaaaaaaattctgatgtacaattaagaatcgactgtccttgaaacaagagagactcactgttaaaatgggccctggaaaatgtatacttatcttttatgtgtttcaaaaacgcacacccagaagaagctctgaaactggagatggtcatggttgcacaacagtgtgagtgtgcttcatgccactaacctctgaaatgactacaatagcaaacattgttgtatacattattcccacaatgaaaattaaattaacaaaataagagatacgcccctacactctgccacacacgtaagtactttgttcagagaaaagctctggagggatatatgccagagatcagataaaacattctgtatggcttttatgttcttctttgtggctgtctacttgtgtctacttgtattttctaattttctcatagtacacatgtattgtttttagatttttggttttttttttttgagacagggtctcgctctgttgcccaggctggagtgcagtggcaccatcacagttcactgcagcctcgacctcctgggcgctacagatcctcctaccttggactctctagtagctgggattacaggagtgagccaccatgcctggcctgtttatagagatgtttgaagttattttcaaaattagttataaattaatttaggttttaatacagcgtggtgatgaattatttcatactaaatttgcaaatactttggatctgaatacttccagatccaaaaatatcagatgaaaaatattatccattagtttgatgacttgaaagtttatatttatgttagctgcaataaatttttttaatgggccatgtaatttatcaaaaatgtcaagcctctgttactctccctcggtatctgttttaccaaaatgtggcacctgccacattctgcatggagttattccactgaattcagtaacaagccagctgcaatagagcccagacatctggatctgtttggtccttcccgactcactgaagcttgaggcatttccttatttgatacatcttcattgtgaaatgagaccgtccagggagtgcaacaccttttctgctgggacgcgctcaggaaggacagcgctcagtgctgggtgctctcgcccccctaaagccacaccagggcttaggcgcagtgtcttctgcaccaaccccaagtccacttcgttccctcccgctcatgaaagcacactgagaacaagccagagggagacatttttaaaacatacctcctaatccaagtttttaaagtaaatcatttgaaaaattcaatgctataactcttagcaagaaattgagggcactgaagctaggggtccagagcccatgctgttccttaaatcaggggtccccaacctgcagtccctgacctgtcaggaaccaggctgcgcaacagaaggtgggggggcagtgagcgagcattactgcctgagctcacctcctgtcacatcagcagtggcagtagattctcatgggagccccgaaccctgttgtgaacagcccatggagggatctaggtgccctttctgagaatctaatgcctgatgatctgaggtggaatagtttcatcccaaaaccatctgccccaccccgtccatggaaaaattgccttccatgaaaccagtccctgctgccaaaaagattgggggccacaccttagatgatcaaggtgtgagtgtgtggttaagcaaaataagcaattgtgaatttcaagggaaagaggaagcaaatgggtgattttggcaaatagaagaatcataatgaggtcaggcatggtggctcacacctgtaatccccacactttgggaagccaaggtgggtggatcacctgaggtcaggagttcaagaccagcctggccaacatggcaaaaccctgtctctactaaaaaatacaaaaatactatccaagaagaaatttcataaaataacccatatttctcagtatgattcttttttttaattttttttttgagatggaatctcactctgccacccaggctggggtgcactgactattcacaggctctatcacagaacactacagctttgaactcctggcctccagtgatcctctcacctcagcctcttgagtagctgggatgctccacaatacctgacttaatcaaatttttgatctttgcaaatcttacaggtgaaaaatatattggtgacatttatatttttgtttctttatgaatgaagaggagcacgttttatattcttacagccctatgcatcacttcctgtgtgttatctgttcatgtcttttatcttttttattgagattttagtcgttttcttgtttatcttatgaaaactttttatgttagggaaattggccctttgtgatatgagttgtgaaaatttatttaccagtattccacgtgttattttgatgttgtttattatctttttgtaatgcagattttttaatgcagtcaaatttttaatctttgtgtttctttttttttgtttagtgttgttttgtttttcatcatgcttagaaatacctttcctagtcagagattacacttaaaaatttttccctttattactttaaatagttttatgttttcatgtttacatcaatttttcatctgattgaaatttatcctggcacaagatgagagatatggaaccaatatttttcttttccagatggctattccttttcctcctattgacttgaaatgccaccttcataatctagtagttctcacgttttaggagctattgctggacttaatctactctgttccttgattcatctactataattattgtaattttataaaagactttaatatctgataggtctagtccatcactattagtcttttccagtttgcttctctgatttttaaaaatttaaccagataagtaagcattatttttaaatctgtcttttcatatattgtataatattaattattcaggaatatacttaaaatttgactgagttgggaatggactactcctcttttaaatagttcatattcacaggtaaaattacaggctaactatttcaaaaatatcaaggacttgtcatccatctaaaactggatttgatacagccaactttttgaggaacactatttccatttagattgaaacagtaatagtaatatagcatccctcaaaatttgttttgcatgcatattattcatattcttctataactatatgttcatttaattaccttaaagcttttggctggacagagtctcacacatgtaatcctagcactttgagaggccgagctgagaggatcacttgagcccaggagttcaaaatcagcctggtcaacacagcgagatcatatctctacaaaagaataatttaaaaataagctgggtgtggtggcacatgctcatagtcccagctactggggaggctgaggtgagaggatcgcttgagcccaggagtttgaggctatagtgagttgtgattgtaccatggtactccagcctcagacaacagagcaagaccctgtctcaaaaaataaataagtaaaaaactaaataaagcttttgagactgtttttccattttcttaatattgcttaaagcaatataaaagagtagaataatttacttcaaatgactatctaatgttaggcctaacatacacccagtgatactgctcattgtaaaatcttgggcaagtcacttctgtgctcctcagttccctcatgtgtaaaatgaggggtgtttaaatttccacaattctaagaactaagagagaagttctttcaatctattgattgctgatattctctccaggtctcagtttccatgtctagaaaaaaagggccttgtactgaaatgatcttgaatgtctctggtggcgttattttctttcctttttttctttttttagacagagtattgccctctcgcccaggctggagagcagtagtgcaaatctgcactcatagctgcctcagcttcccagactcaagcactcctcctgcctcagcctgccaggtggctgggactataggcgtgagccactacacctggctaattttttattttttgtagagatggagtctcagtgtgtcgcccaagctgctctcaaactcctagcctcaagcgatccttcctctttggcctcccaaagtgctgggattataggcgtgagttgccgcacccagcactggtgttattttcaacatcccagctcacattgatgattatgattctggatgagcaactgcctgatgggtgggaagtcaagtgctaggaagaatgtttgcttgattgttctttttattctgtgttttcctcttatgttaataattctctcttctgggcagcctcttttagtgtcctctgagtggcaagaattaccttcatccaaaccaaaacttagggctaaaagaaaaatgaaattatctaagacagaaatttctgaagattttgaagaggatggcttaggtgtactaccagctttcacatcaactttggaacgtggaggtgtggaaaagctattggatttaaattggacagagtcatgtaaaccaacagcaactgaaccactatataagaaagttaagaaagtccactggaaacatctacttctttttttttttttttttttttttttttttttgagacggagtctcactctgtcacccatgcttcagtacagtggtgcgatctcggctcactgcaagctccgcctcccgggttcatgccattctcctgcctcagcctcctgagtagctgggactgcaggcacccgccaccacgcccggctaattttttgtattttttgtagagatggggtttcaccgtgttagccaggatggtctcgatctcctgacctcgtgatccgcccgcctcggcctcccaaagtgctgggattacaggcgtcagccaccgcgcctgaccggaaacatctacttctaactttttttgtgtttctgctccagcctttggttcctctcttcccccggctgcccgctctcacagtcctgcttccttgccttttgcctcatattgtcagatagctagttttggttttgctgctcctcccagacagtttgatgcatctcaattcagccaaggccctgtgcctggcagttgtgctgactgtatcccacagttggcgtcttgtcccacaggacctccccagaacccctcttctgcaccctactgtggcattgctctttcagggagctcattgagctccacacagtctgctccactgcaacctgttggaggccgtacgaccaggccttctactggcacctaccctgagctggattctccccagcttcatttctctcttcctacagaccctgatcccatcagaggttttgggtcttatcatccctctgcttcctctccttttcattttcagctttccgcagcccctttgactgccaataacctctgccttacctgagcctctttacagtcagtcctggactaccccagtagatctctgtcttctggacgaatcagtaggcagtcttgaaggaagtcaatgtcctgactatggttttcaaagttgttctgaaacagaaagtcatgagctatgagaagtactgctttttacaaataaaatgtgatacaacagacaacagtatcccgtgctttctggaggtaatagaggaggatgaaacagtgtgcacacagcactggcaggatgctgtgccttggactgcactcttcagtctacagagagaggtatgtgttttatttctccttaaatctgtggttagctggcttcatagtttagaatggggctcctcaaagcagctggtcaaggaactgtctatcgtcagtctgtagtgaaggaaggggcttgtgcactggggtgtaaatcatactgcttcactcattgaggaactcttgctacaaaacaaaacagacagctggatgaaacagtgtgcttgatgctggctggtgtttctctaccaacattagaccagaacctcatgctggtgaatgtttctattcctcacatgaaaatgaagatctctgaacagatgatggggtgagatcttaatttcctagattctagaactaatggattgtaatccacataaatttcacactgtgaagtagagcacaagcacttgtacttgtactctaaatattttcacataaggtcatgggaatacagatattattcaacgtgtatattgtgttagagcttatcactccatttgttaagctaataaacaccctgtagatttggcccctgcactggtactaagacccagtcctgcatctgtgattacttggtttggtgtaaagtagtttagtgaaacggaaagggcttgatgcagcataaaagtaagcctgagtcccagccaactttgtgattggggcaagtcaggtaacctttctgagcctcagtttcctcatccatatagtggagataatgatagtgtctacttcacagagtgggtttggggtttaaacaggataatcacagctgcccagtttccctacttgagacagtgcacccaaaagcctgctgggagcatactgcagatggtcaagagtgtggatcccacagccactcctggctctgctgcttgttagctgtgagactttagacaattacttcacctttctctgcctccgtgttctcatctgcaatgtgggtgtgataatagtgctccacaggaagtggctaaacatataaaagaacagcacctggtaccatttctctatgggatggcacatattatcactgctgtaatttttcaaattattgccataggcccttaaacctgtgcacctgcctagggccacaccctgctttctgctccctgtgttggtttccctggattctgtctccgttgaggttaatatccccaagctcaggcttagcacactctcctctgcatgtgatgaagcaggcagatgttgggggggtgcagggaagttagttttaaagtccgtgtttaatataacaattttatacttagaaaaaactgtcattttcatgtttcagactacatcagggtacatttttatgttaaacaaaaggaatcatgctggagatctactgtacaatacagggcctatgattgacaatccaatatggtatacttaagcatttgctaagaggtctatcttatgttaagcactttttccacaaaagggaacaaaacaaaacaaaaggggtggaagaaaagttctgggagtggtggctaagttcatggcattgatgattgatggtttgatgttttcacaggtgtatacttaactccaagcacatcaagttgtatacataaaatattggtgactttttgtatgccagtcatatttcagtaaagtgggttttttttaaagagggaatcatgctatttaaaagtttgagaaataccggttcaatgctcattgctagttgataatgcagtagggtgactatagttaacaagacattgtatacgtcaaaatggctagaagaaaatattcgaaatattgccaacacaaatacatgataaatgttcaagctgatggagatcctaaataccctgacctgattatttcacattctatgcatgtatcaaaatatcatgtgaaccccaaaatacgtaccaataaaaaatgaaataaagcattgctagaagaaaaaaagtacgatttaaaaaaatctctacacatgagtctctttccacactttttataaatgccaccacatatgtagtcttcatagcgtttatgaggttccaaacaatactatgtcactagtgtatgaagaaccttattttacagtaataaaaatgttagaaatgctgtaattaactgaaattcaatacatggaaacatatttatctcatagcttcttttttcatttaatttgttaaaattttattttagatgcagaggtacatgtacaggtttattacatgggcatactgtgtgttgctgaggtttgggcttctaattgtcttgttgcccaagtagtgaaaatatgtttttcaaaccttgcccctctccctcccccactacctaacttcttatgtcataaaatgtcaataacataacttacctttgttttcttaattttgtatgatggcttctgaaaacttacaccagaactgcaatttatattaaatcttaatacaaatgctttgcacagcttaaacaaaaaggcattgaaattgtaggtaagtcactatgtttccatttattaagtcatgattttcattcattcataagcatgctcctaatcgttataaactattatgtaaatgagtttactaatgtaataattatgaaagttatatttgaatggaattatatttaaccattaaaggaaatgggagatctggttctagtaatatttttgccgctaactagggtattgtttgtgcacatttattagcataaatagcaccaattgctgtaaaaaagaaatctcagtagcttaacataatcaaagattactttcttgtccatatcccagtcaaatattggtcaggaagaaagttccacttatgtggtcatttagagaccttgactccttccatattgtggctccaccatcttcaataaatgtctttaaaattatcctggtaagagagaagaacaaagattaccctggcatcatccccctgctagacaagaggaagaacactagtcacatagccccatccatatacgaaggcctgagaaatgtactgttaagctgagtgtccaggaggagaaaacagctctggtgagcacctagccagcctctgccagaggcagtttttcaacctctggacctgtttcctttcatgacaacaaggagataggtaaggaaatcctgagcatccttgacccggcaagtggtttgaaggtcaaatgctagccctgggacaggagctgtttgtttgtttgtttgttttgagactaggtctggatcccttgcctaggctggaatgcagtggtactatctcagctcactgtaacctccacttcccaggctcaagggatcctcccacctaagcctcctgagtagctgggactacaggcacctgccaccatgcctgactaatttttgtattttttggtagagatggggtttcgccatgttgcccagtgtggtcccgaaattgtgagctcaagcaatgtgcccaccttggcctcccaaactgttgggattacaggcataagccaccatactcagcctggggattttttaaaataaaatacacattattaaacaactagccaatattcatgaaaagatagaacagcagtgtctcactggccaccatcacttctaaaatgctagaatttttgtattccaggctgggtgggtgggcaaatgcatagcctgtttgacctgcactaggccaaaaaagggtgatgacaatttacatgaagagtgagtgcttgatcccggaataatagaagagccgctatcggactaactctcctgccaataacagttattaactttgaataaaatatttaaaaccattctttgaaagccaggagaataatcaaaaacaggcagaaactagagtgaaaataatctttgaaagaaaggaagccaactaggtgggctccacattaatccagcttgtcaccgaaaggcatttctcagctcatgagacacagtgggaggtttgaactacaacagaaagtcttaatgggatgaggacacggggttggagtttgaggttgccaaagtggctggaagttaaggattaaaatcctataaaggagggaaccacagagcagggagctctgaaatctgcatccaaatatccctcagatccttggctgtctcctaacctctacctatatggggtgcaacctcaaggaatccagaaaaaagtcacagctgggaagctacagagctaagcagagatttcagctgctgcctagtactggccagagtttacagttcaagtggcaccaaattagagagactttatgaatatctttccattgaaaccataaaagggtcataaggatcatatctcatgatcaaggactatatcccaggacaaagggataaaccaaaatagacccatcctaataaagcctaaaacaaagcatacacaggacccaccagaacaaaactgaacactctttagagtaagagagcgtagctgggagtctctacaaggtgtcatttttaatggtcagtatggaatgaaaatttgataacataagaagaagcaagacaatatgatttgtgatcaaagggaaaatgggctataaatgctgacccacagatgacccagatattagaattagcagacacagactttaaagctgtttttaaaaatatagtgaaggattgatttaccagaaaaggatggaatgggtgaataaatggcagaatctcagcaaatagatggaaactataaaggagaaccaaatgaaaatcctagaattggaaaatatagtatctgcaatgaaaaggtcattgaatgagcttaacaacagaatggacacaacaggaaagaaatcatttaattcaatttacaatgtactcaataaacttatctaaactgcaatacagaaagaaaaaaaatagaatgaaaaaagagaagagccaagactgtggaatgatatcaaaaggtttaacatttgtgtaactagggtttcagaaaatgaaagggtagacagaaaaatatttgaatatttttgtaaaattgatcaaagacagcaccttccagatccaagaaactcaacagaactccaagcaggataaattaaaaaaatgaccatatttagataggccagagtcaaactgttgaaaaccaaagataaactgggaacagtggttcacacctgtaatgcctgcactgtgggaggccaaagggggcagatcactttatatcaggatttcaagaccagcctggccaacatggtgaaaccccatctctataaaaatataaaaattagccaggcatggtgacatgcacctatggtcccagctacttgggaggctgaggtgggataatcacctgagccctgggatgttgtggctgcactgagccatgattgtgccactgcactccagcctaggtgacagagtgagataaaaattcaagataaatatattgtcatgtgaggctagagctcagggaagaggtcagaattggaaaagcctggaagaattctcaatgtcagtagtatttaaagcctggctcaggatgaggtcacccaaagaaagaaggtggtctgagcagagcaggtgctaggaccagtctgctgcacagcagggtttagtgttcagactggacaagaaacatcaaagacgcagagaagaagcagcctgagaaacaagaggaaaactggagaaaattgagtcacagatgcaaggggatcagatttcatgaatgtaccttttccacgggcttttcctgtgcttcactgtattgctccctattatccatgttatttttctgtaagtgtgtgcttttctgtctttcttcctctacgtagagtctcaagctgtctgatttttttctctgactagtttttttatctctgtacccaactttgtcttttatcctcttcttcatttctcttttatcatcccttctccttctgcatttgttttttaaataacactgatacacattaggcacttcatcagtttattatttattatattagtcttggagttgtatgctgctattattaatattgcttaaaaatcagtctaacgttttgtaaataataccccaaaaataagccacaaaagaattcagcaaattaaactgcttttgtctccattgattttcttttgtgggacaatggattagtttcttattttgtttttaaaaatttattaagttctttttcctccattaagaacactatattatttaataaaagccctcttatgagcagttttggctacctcagtgatgtaaaattaatggtgtatatgcagatatgtgcatactctgccaggtccttttgtctttactcaaaaaaggtaattgtatattcttttttttttttacattttttattatactttaagttttagggtacatgtgcacaatgtgcaggttagttatatatgtatacatgtgccatgctggtgtgctgaaccattaactcgtcatttagcattaggtatatatcctaatgctatccctcccccctgctcccaccccacaacagtccccagagtgtgatgttccccttcctgtgtccatgtgttctcattgttcaattctcatctatgagtgagaacatgaggtgtttggttttttgtccttgcagtagtgtactgagaatgatgatttccaatttcatccatgtccctacaaaggacatgaactcatcatttttaaggctgcatagtattccatggtgtatatgtgccacattttcttaatccagtctatcattgttggacattttggttggttgcaagtctttgctattgtgaacagtgccacaataaacatacgtgtgcatgtgtctttatagcagcatgatttatagtcctttgggtatatacccagtaatgggatggctgggtcaaatggtatttctagttctagattcctgaggaatcgccacactgacttccacaatgattgaactagtttacagtcccatcaaccgtgtaaaagtgttcctatttctccacatcctctccagcacctgttgtttcctgactttttaatgattgccattctaactggtgtgagatggtatctcattttggttttgatttgcatttctctgatggccagtgatggtgagcattttttcatgtgtctgttggctgcctaaatttcttcttttgagaagtgtctgttcatatcttttgcccactttttgatggggttgtttgtttttttcttgtaaatttgtttgagatcattatagattctgcatattagccctttgtcagatgagtcggttgcgaaaattttctcccattctgtaagttgcctgttcactctgatggtagtttcttttgctgtgcagaagctctttagcttaattagatactatttgtcaattttgtcttttgttgccattgcttttggtgttttagacatgaagatcttgcccatgcctatgtccagaatggtaatgcctacgttttcttctagggtttttatagttttaagtctttaatccatcttgaattaatttttgtataaggtgtaaggaagggatccagtttcagttttctacatatggctagtcagttttcccagcatcatttgttaaatagggaatcctttccccattgcttgtttttctcaggtttgtcaaagatcagatagttgtagaaatgtggcattatttctgagggctccattctgttcgattgatctatatctctgttttggtaccagtaccatcctgttttggttactgtaggcttgtaatatagttttaattcaggtggtgtgatgcctccagctttgttcttttggcttaggattgacttggcatgagggctcttttttggctccatatgaactttaaagtagttttttccaattctatgaagaaagtcattggtagcttgatggggatggcattgaatctataaattaccttgggcagtattgccatttttatgatattgattcttcctacccatgagcatggaatgttcttccatttgtttgtatcctcttttatttcatcaagcagtagtttgtagttctccttgaagaggtccttcatgtcccttgtaagttggattcctaagtattttattctctttgaagcaattgtgaatgggagttcactcatgatttggctctctgtctgttattggtgtataagaatgcttgatttttgtacattgattttctatcctgagatttgctgaagttgcttatcagcttaaggagattttgggctgagacaatggggttttctagatatacaatcatgtcgtctgcaaacagggacaatttgacttcctcttttcttaattcaatacgctttatttccttctcctgcctaattgccctggccagaacttccaacattatgctgaataggagtggtgagagagggtatccctgtcttctgccagttttcaaaggcaatgcttccaggttttgtccattcagtatgatattggctgtgggtttgtcttagatagctcttattattttgagatatgtcccatcaatacctaatttattgagagtttttagcatgaagggttgttgaattttttcaaaggtcttttctgcatctattgatataatcatgtggtgtttgtctttggttctgtttatatgctggattacatttattgatttgcatatattgaaccagccttccatcccagggaagaagcccacttgatcatggtggataaactttttcatgtgctgatggattcggtttgccagtattttactgaggatttccgtgtcaatgttcatcaaggatattggtctaaaattctcttttttggttgtgtctctgcccggctttggtatcaggatgatgctggcctcataaaatgagttagaaaggattccctctttttctattgattggaatagtttcagaaagaatggtaccagttcctccttttacctctggtacaattcggctgtgaatacatctggtcctggactctttttggttggtaagttattgattattgccacaatttcaaatcctgttattggtctattcagagattcaacttcttcctggtttagtctgcagagagtgtatgtgcccaggaatttatccatttcttctagattttctagtttatttgcacagaggtgtttgtagtattctctgatggtagtttgtatttctgtgggactggtgctgatatcccctttatcattttttatcgcatctatttgattcttctctcttttcttctttattagtcttgctagaggtctatcagttttgttgatcctttcaaaaaaccagctcctggattcaataattttttgaagggttttttgtgtctctatttccttcagttctgctctggttttagttatttcttgccttctgctagattagaatgtgtttgctcttgcttttctagttcttttaattgtgatgttaggatgtcaattctggatctttcctgctttctcttgtgggcatttagtgctataaatttccctctacacactgctttgaatgtgtcccagagcttctggtatgttttgtctttgttctcgttggtttcaacgaacatctttacttctgccttcatttcattatgtaccaagtagttattcaggagcagattgttcagtttccatgtagttgagcggtttttagtgagtttcttaatcctgagttctagtttcattgcactgtggtctgagagacagttggttataatttctgttcttttgcatttgctgaggatagctttacttccaagtatgtggtcaattttggaataggtgtggtgtggtgctgaaaaaaatatatatattctgttgatttggagtggagagttgtgtagatgtcaattaggtccgcttggtgcagagctgagttcaattcctgggtatccctgttaactttctgtctgattgatctgtctaatgttgacagtggggtgttaaagtctcccattattattgtgtgggagtctaagtctctttgtaggtcgctcaggacttgctttatgaatctaggtgctcctgtattgggtgcatatatatttaacatagttagctcttcttgttgaattgatccctttaccattatgtaatggccttctttgtctcttttgatctttgttcacttaaagtctgttttatcagagactaggattgcaacccctgccttttttgttttccatttgcttggtaggtcttcttccatccttttattttgagtctatgtgtgtctctgcatgtgagatgggtttcctgaatacagcacactgatgggtcttgactccttatccaatttgccggtctgtgtcttttaattggagcatttagtccatttacatttaaagttaatattgttatgtgtgaatttgatcctgtcattatgatgttagctggttattttgctcgttagttgatgcagtttcttcctaatctcgacggtctttacattttggcatgattttgcagtggctggtactggttgttcctttccatgtttagtgcttccttcaggagctcttttagggcaggcctggtggtgacaaaatctctcagcatttgcttgtctgtaaagtattttatttttccttcacctatgaagcttagtttggctggatatgaaattctgagttgaaaattcttttctttaagaatgttgaatattggtccccactctcttctggcttgtagagtttcttccaagagatctgctgttagtctgatgggcttccctttgtgggtaacccgacctttctctctggctgcccttaacattttttccttcatttcaactttggtgaatctgacaattatgtgtcttggagttgctcttctcgaggagtatctttgtggtgttctctgtatttcatgaatctgaatgttggcctgccttgctagattggggaagttctcctggaaaatatcctgcagagtgttttccaacttggttccattctccccatcactttcagttacaccaatcagacgcagatttggtttttcacatagtcccatattacttggaggctttgttcgtttctttttattcttttttctctaaacttcccttctcgcttcatttcattcatttcatcttccattactgataccctttcttccagttgatcgcattggctcctgaggcttctgcattcttcacgtagttcttgagccttggcttttagctccatcagctcctttaagcacttctctgtattggttattctagttacacattcgtctaaaattttttcaaagttttcatcttcttcacctttggtttgaatttcctcctgtaactagaagtagtttgaccgtctgaagacttcttttctcatctcctcaaagtcattctccgtgcagctttgttccattgctggtgaggaactgtgttcctttggaggaggagaggccctctactttttagagtttccagtttttctgctctgttttttccccatctttgtggttttaactacttttggtctttcatgatggtgacgtacagatgggattttgttgtggatgtccattctgtttgttagttttccttctgacagacagaaccctcagctgcaggtctgttggagtttgctagaagtccactccagaccctgtattcctggtatcagcagcggtgtctgcagaaccacggattttcatgaactgcaaatgctgctgtctgatcattcctctggaaattttgtctcagaggagtacacagccatttgaggtgtcattctgctcctactggggggtgcttcccagttagactactcgggggtcaggggtcagtgacccacatgagtaggcagtctgcccattctcagatctccagctgcgtgctgggagaaccaccgctctcttcaaagctgtcagaaagagacatttatgtctgcagaggttactgctgtcttttgtttgtctgtgccctgcccccagaggtgaagcctacagaggcaggcaggcaggcctccttgagctgtggtgggctccacccagttcgagcttcccggctgctttgtttacctaagtgagcctggcccctcccccggccttgcagccaccatacagtttgatctcagactgctatgctagcaatcagtgagactccgtgggcataggaccctccaagccaggtgccggatataacctcctggtgctccgtttcctaagcccatcggaaaagcaaagtatttgcgtgggagtgacccgattttccaggtgccttctgtcagccctttccttcaccagtacttgaccagccctttccctgaccccttgcaattccagagtgaggcaatgcctcaccctgctttggctcatgcacccactgtcctgcacccactgtctggcactccctagggagatgaacctggtacctcagatggaaatgcagaaatcacccatcttctgtattgcttacgctgggagctgtagactggagcttttcctatttggccatcttgcctcctccccccgtatattcttaattataagacaaaggttttttttccttccctaaaaccactttttgtctgtatgctgtggctcatgcctataatctcagcactttgtgaggccaaagtaggaggatcacttgagtccaggagttggaggctacagtaagctctgatcacacccactgcactccaacgtgacagagtgagcccctctctctcaaaaaaaaaaaaaaaaaaaaaaaaaaatgaagcttgcctttttaaaataaaaatggttgttaattctgagttcaacatatgtaaacattcatttttcaattttgatatttcataatatagtaaaagatcttgattaggatacctgtaggtactaaccactagaaataacttgatacaccagtgtaactggtcataactcttgtttgtctgttgaatatttaggtttacctttctaagctatttgtaacaagagcctaaaaactggatttctttcattgaacttcatacctctctggttattgaagatggcaagcgaggggccctctggatacaggtcagtttcctgacaatcatcaggatactatgatagggacacggttccaaccatcctcatttatttaaatagcaagctaattaagggccttgaagagtattagagagtttcaccatctgctcatgtcctgtgatttagctgtattataattctttaatgggaattttataagaaggcagtttgagatgcagagtttccaacagacttaacgcagttttttcccctttaggtataaaaagaagagaacatctcctggacctaattgccacaaagcaatattacagtttatttgcaccaggttggaaaaaaagggaatagtgttcaaatcactgatggaactggaatatgcttctatttccaggtggctttaactatagtattatgcaacttatttatattttcaactatttatttaataaaccttacaaacaagctatagggaattatcttacatgtgtagactactttataagtatgtaggaaggtaatttttttcaggtgacagcttgcccaagtctcctgtggtgggcagggctgatgtggtatttgtgccttaggctgcaaaggaaatgggctcaaagagtttcagtgtagctcccctggaccccggcccttctggctctggatatggtactcttcactgcagtgtgctgatcctgggtgcctccagaaaacccataatgtgactgttgtgccccgcccttttcccaacaatggcagggcctgggacaagaatacaatacaagtatttaaagtttataactttatagtttgtaaaatacaagtatttaaaaagttataaatcaatctagcaaactattagattaagaagtgtgtcctaatctcctcccttggcaaatacaactttataaccacctggaagaccaggttcaaattcagcccttggctgacccttagcaccctaagaggccttgccagcacacatgaataccccaccccacccatcaaaatgccgtccagaccccatgcgattgccccctcaccccagccaccttgcagcaccagtgagatggcagcactgttcaaactcaggatgacagaccagggaagaccctggaagtggactcagggccatgtggtcaggaacgctggagttgcaggtctaaaaaggaggatgtgggctccagggtgggcacattctctggtccatacagaccctctaccccatggcaagaggggcatgaccagagtatgatccctctgacatacatatatatgtatacacatacacatatgcacatacatacacatatacacatatacatacacatatgcacatgcatacacataaacacatgtatatatataagtatatacatacacatatgcacatacacacttacacatgtatatataaatatatacatacacatatgcacatacatacacacatacactgtatatataagtatatacatatgcatatgcacacacatacacatatacacatatacatacacatatgcacatacatacacctatacacatgtatatataattatacacatacaaatatacaatacacatacaaatatgcacatgcatacacatatacatacatatatgcacatacctacacatacacacatatacatacacatatgcacatacatacacatatacacatgtataattatatacatacaaatatgcacatacatacacatatacatacacatatgcacatacatacacacatacacatgtatatatataaatatatacatacacatatgcacatacatacacacatacacctgtatatatacgtatatacatacacatatgcacacacacatatacacatatacatacacatatgcacatacatacacatatacacatgtatatataattatatacatacaaatatacacatatacatacaaatatgcacatacatacacatatacatacatacacatacacatacacatatgcacatacatacatatacacatgtatacatatacatacaaatatgcacatacatacacatatgtacatacatacacatatacacatgtatacatatacatacaaatatgcacatacatacacatatgtacatacatacatacacatatatataaatatatacatacacatatacacatacatacacatatacacatatacatacaatgtaattggcttatgttcttttaaaggcaagataaggggaaaactaatcaaactaataaaaataccgttgcaagggaggtttggtagagaggacaaggatggaagctaggtttctcctagtgtgcttcgttttgcagttttgactttgggactatgtaaatattttatgtaataatggataagattgatatttatttatttgtttgttgagacaaagtctggctctatcacccaggctggagtgcagtggtgcaatctcagctcactgcaacctccacctcctgggctcaagccatactcccatctcagcctcctaagtaactcagaatacaggcatgcaccaccatgccctgctgatttttatattttttggaaagacagggcttcaccatgttacccaggctggtctcgaactcctgaactcaagcaatcctcctgcctcagcctcctgaactgctaggattacagacctgagccaccatgcccagcctggaaattaatttaagatgactttaaaacatagttaataatttgactgtatcaaattatgtcaaatcccctagtgggatagtgcctaaggattaaaaaatattacaaagaaatctcactgggagtagccatggtgttaataacacttttgatttgttattttggaaggtagatactaatattgatagaaactaatatgtataaaatcaaataagttaaatgaaaccccttgatttctaaacttgaattagatcagagaatagaggaacatgttatgtgactccatgcaaatgcagtcagcaaagtctggaatgtggggaaataaatggcaagataaaaaaaaggttgaggagcagaacctataaataatcctttagagacatgtcaaccaaaagcaagggtagaccttgtttagatcctggtttgaacaaaacccactgcatttaaaaaaacgagacagggaaaattaaacactacctggatattttttgatatttaaagaaatattgataacaattttttttttttgagacagagtcttgctctgtcacccaggctggagtgcagtggtgcaattttggctcactgcaagctctgcctcctgggttcacaccattctccttcctcagcctcccaagtagctgggactacaggcatccgccaccatgcctgactaatttgtttgtatttttagtagagacgaggtttcaccgtgttagctaggatggtctcgattgcccgacctcgtgatccactcacctcggcctcccaaagtgctgggattacaggcgtgagccactgtgcccggcctgataaatattttttaagtgtaatgactaagaaaaagttcttgaacacaaaacaggtgttcaggaagtcctgggctaggcacattggctcatgcctgtaatccacgcactttgggaggctgagacaggaggagcacttgagcccagcaagatcaagcccaggagtttaaggtcagcctaagtaaccaatgagacccccgtctctacaaaaaaacttttttaattacccaggcattgctgggcacagtggctcacacctggaatcccagcactttgggaggccaaggcaggaggcttgcttgcttccaggagttcaaagaccagccttgaccacatagcaagaccctgtgtctacaaaaaaatgtaaaaattacccgagtgtggtagtgtgtgactactcaggaagctgagttgggcggggggggtattgcttgagcccaggaggccgaagctgcagtgagttgtgattgtgccactgcattccagctggggcaacaaagaaagatgctgtctgaaaaaaaaaaaaggagaatcataatttactatatgtaatttatacttctgttttttaaaaagcaataccttctcattagtttgccaagaaagatgagaatttattcttttttctatttagggagttttctttttggatttatttatttatttatttattgaggcagggtctccttctgttgcccaggctggagcgcagtggcatgatctcagctcactgcaacctctgcctcccaggttgatcacttcagcccagcaagaccaagtccaggagtttaagaccagcaattctcgtgcctcagccttccgagtagctgggattacaggtgcacaccactgtgcccagctaatttttgtatttttagtagagacgatgtttcgccatggtggccaggctgatctcaaactcctggcctcaagtgaaaataaaccagtgccacttgccaagagaattaattaaataaatatcaaagaaaaaacactttgaacagctaggagatgggactaaaaaattagtatttgacttaataggcacatccaaagaggtatttattctatttatattattcctgattagtaatattatagctgttagaacaagtataatctttgaacctgtttttgaactgtaataccacaaagcattaaagcaagattttcaaaattgatcaagtatattcaagcatatagctcttactacattattactatggtgctagcaaaatggtttgctggcacttgagtacrtaagacaatacgatgttaggccaggcgtggtggctcacgcctataatcccagcacttttgaaggctgaggcggggggatcacaaggttgcagtgagctgagattgtgctacagcactccagcctggaaacaaagygagattccgtgtcaaaaaaaaaaaaaattaaatattttttatttcctgtttattgcatgtttgaaacttttttctgtattttctattttgggatgtacgtaatattgatgcaggagtacattacctggaggtgtaggcacaagattttcttactagtggaatgtgaaccaaaaagtgtagaggccactggactaaaggaggccagctgaattagtgaaaatattcaaagccagttttgttgttttcagcagtcagtaacagtcagtagacgaacatttaccaggaaatgtcggtcttttaaacactttggacatgcttcttatttagtatgttcattctatcatgacattcaccaaacatttattgagtgcctactgtgtaccacggattagtaagcacattaaatttataagctttgttgatttccaccacaaacccataagacctcatgttattctcataattgaggaaactgagattcccagtgttgaatgaaagccacacagtatcacatggccaatatcatgtgattgcagagtcaggatcaaacccagctcttcaccatcatgctatactgatagccctttcccagttcacagggaaaaatcaggaacagggagagaattttcaaaatattaagtttccccatagaattttctgaagaactctggtgtatgttgccacttgttcactgacaagttctagcagatgacagaacaaatgaggaagtagctaattaatattaatgaacaaccccagaatttttctgagtgttgaatagacttgaatattcaacagtctcaaatatttgacaacatttagtggacacagacttgactcgatatgcttagtctaccaagtttttcctggcttatgagacacagctgaacatatgccagtttcatgggggactgtcagatattctgaaggtacctaatcaagtcagtacagtaggaaggagagagaaacagaagtctcgtttgtgaaatactacttgagtttgtgcgtgaagaatggataggatttaaactgagaagagtggcaaggggacaaccataaacaactatagagaggctggaaccttagctgtcctgtaggcagcagggatgcctggaggcatgtggaaaccacgaatggagggcacaggacatttgacaatgcagtgcataagctcaacatcagacaagtagaagaacttctgtaagatgtcaaggaaaactgcttttattaaatatcttaatttttggcagaatcattttgtctgatataatgtgatgggtttagtaccacattacatttcacatgttatgttctgaaatctgaaacatttattttttttaatctaagaatattccctgggcttttgaagcaataaagaaagcaagtgaatgggtaagaagaactgaaggacagtacccatctatctgcccatggcttgaactggggaatgactgggactcggccaccaagcagttacagggactccagcccataaacactgtgtcccctcttcatagagtccttcattacagtcaaggctaagtcaaatgaaactgaattttaaactttttgcatgcttctatgtagaaaattatcaaatgataatagatacttataatgaaactccattaaggttttattcagtgtagcaattagtgtctttaaaaataaagtggaagcagaactactttaatcaactaacaagcaatagtgaaacttaaaatatttcagttttctgtctcattttttgttattttattttttatatatattttttgagacaaagttttgctcttgttgctcagactggagtgcaatggcgtgatctcagctcactgcaatttctgcctcctgggtacaagcaatgctcctgcctcagcctccagagtagctgggattacaggtgtgtgccaccatgccctgctaattttttgtatgtttagtagagacaggatttcaccaggttgcccaggctggtctcgaactcctgatctcaggtgatccacccgcctcggcctcccaaattgctgggattacaggcataagccactgcacctggcctgttgttgttgttttagagatggtctcaatctgtctcccaggctggagtgtggtggtgcgatcataccccactgcagcctcaaactcctgggctcaaataataatcctgcctcagcctcctaattaattgagactataggcaagtgccaccacatccagctaattttggggtgtactttttgtagagatggggtcttgctatgctgcctaggctggtcttgaattcttggcctcaagcaatcctcccacctcagcctctgaatgtgttggaattacttgcgtgatcctctgcacccagccagtgtttcagagctttaaggtgatgagagatgcttctggatggtcctgggaacctgcgtccttcgcacattcaggagtcaagtggaaagctggctcagctggactgagcaagctcagaagaaatatggccttttgtaggggatctgtcaggatggtgggagaaattataaaaattaagttgtaggaaatagacacaaaacttcttggaaggctggcaggtttacatagcttcagtaaaagatttgggtgaaggcagctgaattctcttaaaagcttagggcgtagatacataggaatgtagaggagtttatctaaatagcttgttttctcatgtggtcctaaaacagacctttgatcatttgcaggtgcatgactgctctctactcaggaggtcagcaatgttaatttccctctagaggtgtggtgtttacttgagacctttgtcattaaaactgtgctgaataaatgcctggagccccagcctgacagggctgtgactgctgactctttacagcaccctcctcagtgtctgggagctgcccagtcccctaccccactctttcatgggatacctgtgtctgagtgcatttcttcacccgtcatgcagccaggttatgcaggttagacccagcaagttattgacagagtttgaaaattatacaggattggttgttgagttggatgttttagtcaacattaagcacatgcctcagcagtagttgacttttgtctaaagggagagaaagaaattctaattttcccaaatgtccaaggctccaaacaaaacatactgaattaagatttccagaagaaagtcctggcaacttggatatttaataggtgctccaggttatcaagcacattagaacacaatggcccaggtgctgtatctcaaagtgtgagtctgtggactggcatggtctgccttacttgggaactcaacaagagaggcagaatctctgatcctgtttgagactattgaatcagaagctgcattttatttagcaaggcccccaggtgactcctgtgcatgtttatagttgaagggctagtggaatgtggtgataggaacatatttggtgcttgtccagggccttgttttaagaacccatgatgcttgtgcccagtagagcaactcatcagtccaattgttgggagaaaagctgaggcaagacttgctagtctgacataatatgaaaagagccttggaacatatcctcactacagagtttaaaacttcttgtggcctgtggaacaccaggttctgtgcttaagggtggaaggctgccccaccacactacaacctaagcccagggcataaaacccctcgtggcttggatggaatccaggaatcaggacataaaacccctcgtggcctctggaatgtgtccagacttgctggctccttgcttcttgctctcccaggatcacaaattaattgtatcttgaggtagaaggaaatgttcaacattatctcgagtggcagaacatgttccttatgcttcaaagaaaatgctagactgacacagctataaactaaacacttgatgtgactgcttcctttcgaccagcatgtcctcatcatctgcttctttgtttaatcaccaataaatggtgtggctcccagagttcacggccttcacagcctctatactagtgttggccccctggacctactttatgtactattagcttgtcttgtctcattcctttgactccaccagactttgtagcccccatggtctggtgttcagtttgatcacctcaacaccaatgtggctatttgtgactgcctttgttttataatatttttattattcaccttgtacagatgaagacttccacctgtagaggccaaagtgrccacactgcaggtagagcaggcattcaccaaggtgtttgtgatcctggggtgcagctcccayycttggctgcctggstgcttctttccagacctactgtcttgtgacatycccttaggcacscagcacaggctgctktctgatttagaactgagcctgttcagttgatggctcagtgcaggcctytaaaaaacawcctgmtgtkggttagtacatcwrtggttggcttacttatttggtgttcattttttcagttttcagaaaggtcagttgaartgctgctggtggctgtagaattgatacrcagggaggtttttgatctgtgagctttctaagggacaattgctaagctgcactgataccttgagcccctttcctttggaacaatgtagagcccagttcatggctcccagaagtttaggtccagtaatgtggctgcaggcctagagaatgggaggctgcagacttggactaatggtgaaatcttgcctccccccagggatatgtggcgcctgtcataagctccagagagctgccttccataagaccagcagaagagtgggcaaacatgaagtccaatccccctatccaggctgccattgacctcatggcaggggctgcagttacagtcctgtgcctcataagcatgtttctgttggtgatggatggtgtatctgatggtggtcccatgagattataccatcttttactataacttttctgtgtttatatacatttagatacacaaataccactgtgttacagttgcctacagtatccagtacagtaacatgctgtacasgtgtgtagccttgagcaacaggccatactgtacagcctgggtgtggagtaggctaygccatctagggtcaggtgtgtatgytctatgatagcacaatgatgaaattgtgtaaygacacattyttcagaacatgtcccagtcattaagaaaygcctaagwataatcccagagaaaacccagtcttctctattcctcaagtaccttctaaatgagatcaaatgaaagtgktatgaaaacattrcctttctccctctagaagtgatgrgctttacatgtgggatgaatccatttgatggaagtgtggtattgttcagagggtggcagaaggtagaggagtgtccattattgctaacaccttctgagtcagggtgaggggrggaatgtgcccagtacagctggaaaacagatcagagatgaagccccttgtctgttgtcacctggctgggataggcaggtgatattgttcttcacttcaagcctggcagtcttcagagcccttgtagtgcaaaaataacaccatagcatctcccaggaaacatcacttactgtccccgctagtgttgggaaagaaaggaggacactctttagaaacgtcttttacaatgagactgataatggactgtgtcttagagccatgaaaggaaagaagttgtaggatttcctgggaatgtcagctaacctgagcctaggggcctgagcccaagagcagactgaggctccccagcacagggaggtgctgcctgtgaaaagggggtagtgttggcacagtgcaggctactccctagaaagatcagcttgaatatgcaggaagagcaggaccctcgggctgaggcacaggtggaatgggaagtgcatggtggtgatttagttctccaggggccagaagtaggaggagtggttggaatgctgatggcccaaagggaaaccctggactaccctggcctcccacaggactctcatagtaattgcggcactttacagtggggaggctagaaggagtgttgccgaatgctgtcctcatccagtccaccccccacccaccaacaacagatgagtatggtcatgagtgtggtcacctcatcagtcatttgctcagttgtgaaaaagaaactgttcagtgaagagcaaagtgtttttccatgagccaaatgttggccaaggtatgctattgaggaggactggagacagcgtgtcacagacactgataaagagcactgggcaagggcacttctcccagggcagagtccacatggagtgtcctggcaccagacgctcagtgaactgaaggttggcaggggcccaccaagtagtctcttgccctctgcgtgcctttaggctacagccgcccaggccccttaccccctcccctaccccgtgccacactggggaggatgctgaccctgagagtggtgcaaccatctgcctgcccctggccaccacctctcaccagcacgtgaatgctcttgggctcagttctgtctcttcagtaggagggtgtttagccacatgagagagtctcacattttgacattttatgtctttcagtctgtcaaagatctagaacatattgtgaaggaattaaaaagtttacttttggcttggcaaggttgctcaagcctgtaatctcagcacttagggaggccgaggcgggtggatcacttgaggtcaggagttcaagaccagcctggccaatatgggaaaatcctgtctccactaaaaatacaaaaattagccagatgtggtggtacacgcctgtaatcccagttacttgggaggctgaggcaggagaattgctcgaacccagaaggcagaggttgaagtgagtgaagattgtgccattacactccagcctgggtgacagagtgagaatccacctaaaaaaaaaaaagagtttaccttttcctatttatgtgcatacaggtatttgggtaccacatttgtaatttacagttagtttgaaagatagaaattgtaacagtatgtttgggagcaaggtatgtaaggcagttgctggtgggcatgttttgaacatgtattgggcccttatatgtatgatctctgtgatmccatcattactgttcatttcttccaggagaggaatgacacacttctcactttaattgccagattatctccaattctgaatcagtggaatataatttaatatgattttactatgattgagtcattctctcccaggtactgctgggctaggataaaatgagatctgaattacattaaaataattaattattccaagagaagaggtgacagaatgttttaagtgggtgtgtaatttagataacctagatgcagataagctgaataaagcatttaatccagcacattcatatttttacttgatcatcagcaataggagtttgaaacccaatcgcagctgcaggtcccacacaactgaattcggttccgtgtgcatagcagtgttggctggagatgcctggaggtctgaaggtgygcccttttataggcaggaattccaccaggatgggtatagcttgtttttttaaaaggcttgggactrgatacgattgccccagaagaccgtgtagacagtgaggaaggctgagcatgaatgggatgacctaccagcacaaaaagggcaggcagaaaggcagtaaagaaacgagcagggcacaaaccaggagagtgtggcatgacaccatggagactgaacagaagcaaaaccacgggcaactgtagtgttgttccctgttgaaggagagacactctattacagaagacctggacttcagttcagctcagtttccttagcaaaggacaaaatggggagagaagacagggaatcagggaagaaaaactcattcacttatgtgaggcaaacatcacatgcagtcatactaaccaactaaacatgataagctacaaagaactatggtattcrctgctctcaaaacgctactgagattaccaagttttaagcttatttcaagattatttataggtgattccccaattgggaaactcatttctgaatttcttctctcctaaaatakatctacaaaaattaacaaactttattccagtaagaaaatttgggatgtactgcttcaacccctgtcctaaggaaattatccagcctggagggtggggtgctatcaactgcctgccaacatgttaccttctggcatccagaagcttccctgtgccagatggagccaccaatgtggggaggagagcacaaagagcagagaatccacagaaaccatacctgcagggaccaaacaccatcacaccccactgccgtgaatgcaaatgcatttacctgttattaccatctccctcagcattttgaatctattctgggattagacaaacttccaacttaactgctatgtttaataaaaacatggtaaaggaagaatcggggctattaaaatatttaagaatgagaaagttgaaaaaagaaaaaaagatgaagattgtgtttggcctgacttctccccaccataaggggttgccacccagctggaggcctgctggtttgtgtgggccagccctcaacacctcagtgaccaaacgaaatacaaccctcactagagcttcttgtacttggcaagacccaggcgtagacctgggctaccaaacaaaaccttgtgtttttagagcctgggaacaagagctttgacagtttccacaaataactcttctacagcattagcatttctattttcacctacctgcagccattactacattggcctctggaaacgtcacatcaggtgttcttgagataaaataccatttactattttttttttcctctaggccctgtccctttgatgttaagtggtggagggagttggcgggatttgcctctggcttgcggtatatccagtggattgtaacaaatccagaaytcaagttctttccatatctggaaaacaggcaggatttatcagaacctttataaatgttgtgaaaaatgaaggtgaataaacacctgtttttccagcatctagtacacatcttaaaatctgagatgtgaacttctctgttttgattgtaaaaggaaagaaaacagtaacacagaaactttgtgtcccaaatagagcacagataacttgtctattactcatagtaatcctcccttaaatttgtgtaacatgtgaagttttacaaagtacttatgcctcccttatctaattcaatcttcataaccaccctgtgcagtactaatattataaaccagtctccaacctcaaggttggtgctcttgccactgcccaggtgaagctgcaaagctgtggccacctctatctccacggttgcatctatctggccatctcaggcctcaatgctgccccatccatatactgagttaaccaagcatggaattggggtgtgttacctgaacatccatcactttcaccacgagacctgatacttgtccttgtttctgttggtctatttagggaaagctgggaatgcgtccttccatgacttggtttttagcactcttgtctggatttacatgtgtaaatatacctgtgctatgcagctgtgtgggtgtccccaaaggagggattgttgcagtcttcgcttgcccttttgtcttctaggaataatggccttatattctggactgaaacctactatgattcgagcattccctgacaatggagcactctttttggcctacgaatataccaggaagttgatgatgagccagttggaagcatactgaagtgtcttggagggcctgagccaagcacaggtgtttgaggactacagttcatctcatggtttcttgtagtacaagaccagtgtgaagttattctgatttcttgggaattttgcttttttgtcttcccttataccctacatctcaaattgtatggaagaacctctattttgcatcatgtcatttctgcccataattgtactgaaatagagaagtcactgctctttcccttggtaaaatagagagtggtcagtagacttatgcacctaattcaaaagactgagtacagttctgtcagggcttttacataaacctctacttgcacatgcaatttggacagttatgtgctgagggaaatacagtttggttccatgtttatttcagatattaccagaaaaacccagaggtgatcgtttctcatgaagatgcttacaaatggttgcttaacacattctagatgtaggatctgcttaatgtgtgtactattctaagtggttgacattttttttaaaatatggaatctcactctctagtcagtctggagtacagtggtgcagtctcggctcactgcaacctctgcttcctgggttcaagcaattctcctgcctcagcctcctgagtaagtgggattacaggggtgcactaccacacctggctattttttgtatttttagtacagacaggatttcaccatgttggtcaggctggcctcgaactcctgacttcgtgatccacccgcctcggcctcccaaagtgctgggattacaggcatgagccactgcacctggccaaataagacatatttttaaccaataaaaattaaggacaaagaagagcattccttatgataaagggcacaattcaaccagaagacgtaggctaaatatctacacacacaacattggagcacccaaattcataaaacaagtttttcttggcctacaaaaagatttagacacacaataacagcaggagacttcaacaacctactgacagcaatagacagatcatggaggcagaaaactaacaaactctgtacttgcacttgacagttgaccaattggacctgacagacatctacagaacgctttgccaaacaaacacagaagatacattctcatgtgcacacagaacatattctaagatcaaccacatgcttggccagaaagcaagcctcaataaattcataaagtttgaaatcataccaagcacacactctgaccacagtgagacaaattagaaatcagtatcaagaagatctctcaaaactacataaatacatggtaattacataatttgctcctgaataactcctgggtgaaaatctaaattaaggcagaaataaaaatattctttgcaattaatgaaaatagggacacaacacacctgaatctctgggatgcagctaaggcagtgttaagaggaaagtttacagcactaaatgccttcatcaagaagttagaagtatctcaaattaactttcctactttgcacttaagggaactagaaaaaaaagaatagactaactccaaagctggcagaagagaaataactaaaattagagaagcactgaatgaagtgctttttgaagtgctgttttttttagactagatgcaaagatccacacaaaagatcaatgaaaccaataattagtttttcaaaaaataaactagatggatagcctgatagctaaacaaagaaaaaaagagaagagccaaataagcacaatcataaatgacaaagatgacactacaaacaatccaacagaaatacaaaagatcctcagagaatactataaacaactctatgcacacaaattagataatctagaggaaatggataaattcctggaaacatacaatcccccaagattgaattagaaagagattgaaaccttaaatagacaaataccgaattccaaaatcaaatcattaatataaaatctaccagcaaggaaaagccctggaccagatgaagcaacagctgaattctaccagatgtacaaagaactggtactagttctattgaaactattccaaagaacaggatgaggggctcctccctaactcagtctatgaagccagcatcagcctaataccaaaatctggcagagaaacacacaaaaagaaaacttcaggccaattactctgattaatatagacacaaaaattcttaaccaaatgctaggaaacagaatccagcagcacatcagtaagttaatccaccacaatcaagaaggcttcagtacagggatgcaagtctggttcaacatacgcaaatcactaaatgtgattcaccacataaacagaactaaaagaaaaaccacatcatcatctcaatagatacagaaacaacttttgataaaatccaacatcgcttcacattaaaaacctcaacagactcggcatcaagggaacatacctcaaaataataagagccatctatgacaaactcacagccaccaacctactgaatgggcaaaagttggaaccaatccccatgagaaatggagcaagacaatgatgccaactctcatcactcgtattcaacatagcactggaagtcctacctagagaattcaggcaggagaaagaaagaataggcatccaaatagcaaaagaagaggtcaaactatctctcttcactgatgatatgattctatatccagaaaagcaaagactctgccaaaaggctactagaactgataaacaactttagcaaagtttcaggataaaaaatcaacatataaaaatcaacagcatttctatacaccaataatgtccaggctgatagttaaatcaagaacagaatcccatttacggtagcaacaaggaaaatgaaataactaggaatacagctaacaaaggatgtgaaagatctctacaagaactgtaaaacactgcggaaagaaatcagagataacacaattaaatggaaaaacattccatgctcatggattggaagaatcagtatcattcaaatggccacactgcccaaagcaattgacagattcagtgctatttctatcaaattaccaatgtcattcttcacagaattagaaaaaagtattctagaagtcatatgaaagcaaaagagggcctcaatagcctaaacaaatagaagcaaaagggcaaagtcagaggcttcaaactataaggctatagtatccaaaacggcatggtactggtacaaaagcagacatatagaccaatggaagagattagaaaacccagaataaagccttacacttacaaccacctgatattgcaaggctgacaaaaacaagcaaagggggaaggactccctattcaataaatggtgttggggtaagtggctagcaatatgcagaataatgatactcgacccatacctttcatcatatacaaaaattaactggggatagattaaagatttaaatgtaagacctcaagtgataaaaatcctagaagaaaacctcagaaatacccttcttgacattggccttgggaaataatttttaactaagtccccaaaagcaattgcaataacaacaaagattgacaagtgggacctaataaagctaaagcgctttggcacagcaaaagaaatgatcgacagagcaaacagataacccacagaacaggaggaaacatttgcaaactatgcatccaacaaaggtctaatatccagaatctataaggaatacacaaatccacatgcagaaaccaaataaccccattaaaaatgtagaaagaacatgacacatacttctgaaaagaagacatacaagtgacccatgagcatctggaaaaattcttcacttcacgaattgtcagagaagtgcaaatcaaaaccacagtgagatacctcctcacactagtcagaatggtgattaataaaaagtcaaaaacaacagatgctggcaaggctgcagagaaaaacgaacgtttatacattgttggtgggagtgtaaattagttcagccactgtggaaagcagtctggagatttctcaaagaacttaaaatgagctaccattcgactcagtaatcccattattggatatatacccaatgggaaaaagatcattctaccaaaagacacacaaactgatatgtttatcgctgtgctattcacaatagtaagatatggaatcaacctaggtgtccatcagtggtggattggataaagaaaatgtggtacatatacacaatggaattctacacagccataaatatgagtgaaatcgggtcttttgcagcaacatagatggagccgaaggccattatcctaagcaaattaatgcaggaccagaaaaccaaataccacatattctcacctatgagaactaaacaataggtacccttggacataaggttgggaacaatagacactgtggactactagagggggatggagagagaggggtgcgggttgaaaaactacctattgggtactatgctctctactggggtgaaatatactgatgtaacaaacttgcacacatacccccatatttaaaattaaagctaaaattttaagacgtaccattctgatctaagtttcttgagttgttcaaagaatcattcattttgcattctaagaaagcaatacccaaagaggccttaaatgagttttctttcaataagcaaaagtagaatagtgtgacaactcataatttccagaaattttgataggtcttggaggtctggggaaaagaaactttaatggtaatctcatttcaaaaagggaaattcttaaaataaaaaagggggtttccttccttcctgtttccagtactgaaaaagacagatcttaatcttcactgagccagctaagtattttcctccctattcacctaaacccaggacataatctgccctctgtagattatcgttgtgtgaattttaaaggaaatagcataacctatgttgtgcctacacgtttctgtcatatgaatggcagggtataatattaacatgaaagtaatttgaaagcatgttctatgatcttttcctcaaagaaggagccagatcagggggagtaaaggaaaaaggcctttagttgggctgctgcacgggcagttggaaccttttttggactatttatttagaggagaaaaagtcacctgcagcgaggcggctcaccagcctagtggggctcttggctcctggaaggttgctgccttccgtgcccaccatggctcagagctctactctcatctgtgccactctggtacccacagcc

SEQ ID NO: 94004 - DNA, 75431 bp, Homo sapiens
aaaaatgtagtcactgaattatgtcatgagtaaaagaaagtttggtgccaagcaccatcttattataatttccaatatttttcattctgccttgccattcatggccaagaagaaattcctttgccatgaaaagcaaataaatatagatgaaaactgaaggataagaacgaggcatctaatacaagtattaaaaagttaataatttggattttatacatatggagtatgaaataactgtactatgagttgttaggattacagccattaataaaagttgaaaaaattgaagcagtagtaattttatctctaaaagcattccagtaggaaccctaaattctgaggggctcagtgtcccagtgtcttttctctgtctgtactctctttctccggctaatctcatttatctcatgtcccatgtcttaaatgcagtccaccaatgagaccctcattaataacaacctcttgcctgaacttcagaaatgtacatcacctacctatgtggcactttgacttaattgtaacaagcatttcaacttgaccttgtaacctactcacccatttccccctgccttgataaatgttattatcatcatctgcccagttatttatccaaatgcttagatgtcattaatcctcattccttttttctcttcattctcacttttaatctgtaggcaaatctgcaggcacttttactacaatgtatatgctaactgttcactactccccactatcattgctgtagcacaagcctgggtctctgttttgtttacgcatagatccttactggacttcctgctccaaaatccaaatagcatgatttttccaaaaattcaaaatagataatgatgtctccttgcttagaaccttcaacagctttccatttcgcttataatatacacctcttacaatgaccagtctctacaggatctggccctacctgcctgtctgattacacattataccacttttactttgctcactgcagccacattgacctttttccaggttattgagtgtatcagggtggctttgcaatgcttgatttctcttgtcatctccacacgggtaattccatgatacaattaaaatctcagtttcaacttaaatccctcttacagccagctttatttacatagtttggaggtgcccaatgattactttttggttaaattaccctctttcatttttatcataatatgtaccactacttaaaagtatcttatttatgcatttatttctttattttctgtctcccctcgtatggaataacacattgcccttttttgggccaatctaattgtggtagaatcttaccaattcaagaatgtcaggtatgtagaatattttgaactttcttcatctataaaagatgaggaaattccctttaactatctcactgggttgttgtgtgtaacaaaacagataagaaagatgaaaatagtgttgaataacgaaatttctatacaatgaaaaatattattattctcattaggtatgggcctgggtaacatcacggataatgggaagacttttcctattagaatattttatcataaactcagaactgtagaactctgtgtccatcatcacttaataatttatctaaactattacatgtattgctacatgaaactttttttacccctatagccagttgacctcaagtcagtgcttagaatcaccactcaaatgataacccttaaagatgttgaaatgactcaacatattctatgaggcatgatctcactgaaagataaggcagtcaagagcttgttttcctgtgctttctccctcaaacatgtcttcacaatcaacctcacactgataagaaattcccagcaccaacaaagagcacatggagacagctactgtccttaaacatcatttccttctacataaatgaataaaaaccccacaaacacaaataataatgaagctatcatgtcagcaataggacttttgtagactgatttctaccttgaaatctagacaattaacctgtcaactttttttcagatctctcttattctaacatagattgaataatttcagatagtaggaatgggttcttaacactgaccttcgtaagttgaaattccaagaatgtgaaacagctgccatttacagagataagcctataaagctttataaagctataaagctgagagatttcaatgtcaaaaaattgggctgctattagcaacaatttaaaagttctgagctttattaagtaaactgaagaataagacataaatagagaatacaaacagatactaatcaccacactcagcctagccttgtggccatcgatgatcttggatatattctacataatgatatctgtgtataaggaaaaagtagtaatatctatattcctgccacatgcattatttcataagcacattagatatattttttgtttagattatcttatctcccatatttagaagtcaagtaccaatttttttcttgctctattcttcatattagtttccaaaattacactaagattacttagaatttttgacttcctgcaatgcatttttttaatccaccacacaaatcactttaaaataaagataataatgaaagaaagttggcgccacaactgagccctcagtatgtgacaagtataaatcagtggggacagtagtcagagcagctttataagcacacatcacgtgctgaccttgcattccctcgattctatttctgctacttccagttcctatttgaaaaaattgaaaatcctgcagttgtgccagtgtttattttggtggttggcaatcaagtaaaatacatttaacaaggaaaatgaaaagtgagttttgcattattggctcaactattcaatcttgcaaagatgcattatatttttctttgaacagccttgaatgctttggtttggtttggaaaagtgggagaaaaaataggaagccccaactattagtaaggagttttatttcaaaatcctaaaatttagagattgaacaagctatgaaacatataggaagaaaaaataataattagttgaaatcttagttctatacgtagtggattaattgtaaaagtgtctccaattatttcgtttctggtacacataccctttgaatgtgagttttcataaggcagcctctcacacctgcaagtgtgtggtggagtcttgatccagttctcagaaatgtactggccttgtgacttgctctgtcctatagaatgcagcagatgtgatgctagcccagtttcaagttaagaactgaaaaggtctcatctaattctgcccattcttttagaaccttaccagtgccaatttcatgtgcaaaagttcatactagcatgacagagaataagaaacctagtagcaggcgagcttattgtcctcagccaaccaaagccaccttgcttcccctaatgctggagaaagcagatactcattgactgctcaattcagaagtacaaaaggacatatctgaagggtcatggcaaggttcagaattcctcatggagtggccaaggcttctgttgcggaagcatcacgcacagttcaactctgactaatcctactccttccacttccttccaggtgttgttcttgagagcactcctttatatataccaagtaaatgcaaatctctatttttgcatatgatttctagaacacaggaagacaaacttagatgccaagagtagacttaaaaaatagactataaagagaaatttgcatctgtatagttggccagatggctgataggtggagcacagatagctcccagtaggaagtactagtgcagttgttaaactttcattgatggaaggaagtacatgaatgactgcagcatgatttcagagttcatggaagataataactataaggctcataaaatggattgatttttgctaggcactcaatattttagaaaatgaaaacaaaagctgaatgtgattaattcattaatttacagctaagtgtgagagtcagaaggcattttagcagcacataaagagatcctcatttcctatagccacaaggcagaaatagttgaggatcaagcccacaattttattataaaaatagcagatctaaaaagaaggttgtatccaggtgcagtggtgtgtgcctgtcatttcagctactcggaaggctgaggcacaagaattgcttgaacctgggaggcgggggttgaagtgaactgatatcatgccactgcactccagcctgggtgatcgagtgagaatctttctcaaatataaaataaaataaaataaaataaataaaataaaataaaataaaataaaaataaaagaaaggttgaattctcaaaatcagcaagtccgtgaagtcatgccagtgtccttattcaagaggacgaagaccttacaagttgatatagggatatgagagccaatgccttgaaaattgtgtgtccccagattattctgaacattctgggcctgcagaaatgctacactcctcccatgtgaaggccagctaatgcccttgcactgggagcacagccatatccacttgcttacacattatctatggctgctgtcacactacaacagtagagctgaatatttgagatgcaaaaactctatgtctctcaaatcctaatatatttgctgtctggcccattttaaggaaatctctgctaatcactgatatagaggaytttgaccttgattctagggacctgaaatttcatcacactctcccattctaggagaaaagataaagtactggcccatttgtgaatcacagtagattcattgggtaaatggacccccttgatggttatttctttaggtccaagaatgtttaattgaaatgatcatattggcctttggcatgatcctcaatgttacttctcctgtaaggtaagacctagcacagtgaggacactcaagtggaagcctttgaaactgcccaactattcctgcctcaccaagagagtgagtaaaaagcaataatatgtcttagggagaacaacagatattagtgttaatcttaaagaaagactcttaaagaacttaaatgatgtaggtatattttttctcaatgtatccatgccaccaatttgtcttctataaaatctagaggaatcctggaaaaagtcttctatgcaaacttgagggatcctggaaaacatgaatagactgtaatttcaaggtcatgaggcatggtgcatgcgttcttttgattcctgtgcatgactggtaggcctctctggtctctggaggcaacatattccacatttaagaaaataattccaacccatttcctaagtagcatgcaagtttcccagctttaaatagggcctggagaaggaaacggatccatatcaggttcaggttacmatgaaagcagccatgccacctgacccataatacctataggctcatgcatttgaagtatctttagtgatgtgggagatcagaatatgcccctccaaaatatgaaggattgttgagctaaaggcaatgaagaagtagttgcaggaaagatttctgcccttttctacatgcataaaagtagtacatagattcacaaagacaaaacatataatgtcactcttctaccagggagaacaaaggtaaagatcaccaaagacaactttagacctttattggcttgtacatggtaccagaagaatctacattaacatggtttgctaattagcatttttttttttttttttttttttaaagacagagtctctgtcacccaggctggagtgcagtggtaagatcttggctcactgctacctccgcctcccaggtttaaatgttcaagcgattctcctgcctcagcctcctgagtagctgagattacacgcatgcaccaccacgttcagctaatttttgtatttttggtagagacagggtttcagcatgttggccaggctggtcttgagctcctgamctcaagtgatccacctgcctacgcctcccaaagtgctgggattgtaggtgtgagtcaggattccccatcctgagacaatgaccctgatggcatggagcccaaaggcatcatcgagagtaactagaatgagatggttgacagctttgatgacatgaaactgtaggagtttcttctccgtggcatctatgcstatggttttgagaaaccctctgccatccagcagcgagccattctacctgtgtcaagggttatgatgtgatcactcaagcccaacctgggactggggaaatggccacacttgtcatatcgattctgccacagattgagttagatctaacagccacccaggccttggtcttagcacccactasagaactggctcagcagatacagaaggtggtcataacacctggagactacatgagtacctcttgtaatgcctgtattgggggcaccaatgtgtgtactgaggtgcagaaattgcagatggaagctccccatgtcatcatgcatacccctggatgcatgtttgatatggttcactggagatacctgtctcccaaatacatcaaaatgcttgtactggacaaagctgatgaaatgttaagccrtggattcaaggaccagatctatgtcatattccaaagtttaacagcaacacccaggtagtttgctgtcagctacaatgctttcttatgtgcttgaggtgaccaagaagttcatgagggaccccatttggattctggtcaagaaggaagagttgatyctggagagtatccaccaattctgcatcaatgtggaacaagagaagtggaagctggacacactgcgtgacttgtatgaaactctgaccatcacccaggcaagtcatcttcaccaacactcgaaggaaggtgggctgactcactgagaagatgcatgcttgggttttcactgtctctgctgtgcatggagatacggaccaacagaaatgagatgtggtaattagcttttatctgctgtttatttgccttcccacaagttgctgcttctagagtctcaaagtccttttcctgtgtcttagtacttatctaaaaatttactgtttttttttaagatgctagrtatgcaaatagaaattcaaagccamctttttgaaaattactcattccctgggtgtctcacacatctgtatgaaatatacatgttaatgaacttctgtttgttttcctcttgttaatctgttctttgttacagtggtcctttttaactaagaatttatgagggttgaagaaaaattatttttcttcttttgcawttgtgacaagctctggtctcagaaccacaagagagaatcctgggattctgtatttaagtcatacatccgtgtctgcattcagaacgcatctcccagcaagtaaaagggctctggtagagactgagcagctgaacccagcacatcaagtgaccatgtgaccacaactgcccatcttgcactgtatatatgttattttcacaagctccaaagtcaagaaggcctagcaacaatgcattttaagaagaaagcaatatatatgggatcaggcacaaagaatcttggagggtgagattaatctacacagcgggtcgcccagaccatttcattcttccttgttgcacccagcatctctcttttggtrtgggggarattttttacagccatctgacagaggaggaaaaaggttgagtttgtttcccaagggcctcacctttgtaagcgggttcaaactgaaaatcagttattgttatacaatagtcccactcatagatgttgcaaaacgactggtgattatacatttatcccaataggcagatcttagggtggtataagttgtcatccactttacatggaaatagaaagtccatggtaggagtatgtacagacacatttacagaagctaatggtttgattggtttgatagagcttgaaggaaaaagattggaagaactgggacacgcagatgaacttacagtaatgggaacaaagtataaagatctatgtatgacattttaakacccaccacagaacattcacaaagaagaggcactaacagtgcagatttaacagcagcttgttgatatcagccagcatcgcatctatgctcagacacccttttgctgcagcagagactcaagcacagggtagccrcggtagtggagatggagccatgcagggcctgacagcacagaatcccactcaataaggttgatctggctacttctctagtaaaattcccaatamcttagcaactgagatcaactgtcagtctctratatggcaccttaagataaccaaccaggcatttggtagcaagttgctacccttggacttctgctctaaaagggacatgattcaccttgattatattttaggtattggcttcctgttcctaacctcaagacctaagccagttacactaccacaaagtttactaaatatttgagccatcacacaggattctgcttataatctcttcagataaagggaatcattttacacaaatgattaacataaaagaaggagaatacaaccacaaartatattggtcttatatactgtattccacaacatgccaacaactgtcagctgatggagcaaataaatygccttttctctttttcagctatatcaaggtagaattgacaaataaaaaattgtatatatttggctgggcgtggtggctcacgcctgtaatccaagaactttgagaggcagaggcsggcrggtcatgaggtcaggagattgagaacatcctggccaacatggtaaaacctgtcttgactaaaactacaaaaattagctgggcatggtggtgcaygcctgtagtcccagctacttgggaggctgaggcaggaggattgcttgaacctgggaggcggaggttgcagtaagctgagatcttgccactgcactccagcctggtgacagagggagaccctgtgtcaaaaaaaaaaaaaaaaaaaaaattgtatatattcaaggtgtacaatgtgtacctctgggttatttaattaatctcatgttttaggattataaaatctagaattatgtagatgaaataattcaacrtggtttttcagatgatgtggcaaaaattgtacgtctatatgcaaaaataaatgtgaatcacaccttgcaccacatgcagaaattataaaacatctccaaggagatgtccaaaaaaaaaaaacccaagagacaaccttgggttaagtttagactcaacatccagcaacaygaatcataaaaggaaaatgaaatatattggcattcaacaaaattwaaaaaaaaagaacgatttgctctttgaatgacactgttaaaaaaatcaaagaaaaagtcacagtctggtagaaaacatttcaaaacatatatatatataaaatgaaagtctgttactaaaaatatatttaaaattttcacaactgaataatgataaaaaattaaaaatgggcaaaatataaaactttattcaaggaaatatgtggatgcacattaacatrtgaaatgattctatacatcattttatttagggaaatgcaaattaagaccacgatgtggtagcgtacatctgttagaatggctttaaarcaaaactggtagtatcaagttgtggtgagcatgcagatcaattggaaatctcatgcaatgctagtggtaatgcaaaatgacacagctatttttgaaaatgatgcagctacttttgaaaatactttgatgctttctcataaagttaaacatctattcagcatacaacacagcaataccactcctaggtggatataaaagagaattgaaagcatatgtttgtataaatatctatacacccatgcttatatcagtcttgctcctaattacccaaattaaagccaaatgtccatcaataaggaaaatatttatacaaattatggtacatctaaacaayggaataaaaaacagcaatgcaacaacattaatgattcacaaawgtattagactaattgaaataaaccagaagcaaatggtagtgcatatagtatgatttcactcgtatgacattttggaaaaggcaaaactatatggacagaaaagagaccattgtttgttaagggctgaatatgggagaaagaattgaccacaaacttgcataagggaatttttttagatgatggaaatgytctatgtcttaaatgtaatgatgatttcttgactacatgcatttatcagaatgcatagaactgtacaaccaaaaggaattaatttgtctatgagtaaattatatcccaatacatgtaaattaatttagtagcacaagaagaacttaggacaatttctggtacaagtaagtgtccaagaaacactagctgctattgttatcatcatcaccattattgaaatgaccagaatagttttaataagtgaataataagccacaaaaataataagttacagtttttataatataggatgagayagtaatacaaatttattcaatttcatagtcaaatatttaratggtcaaatgaataagactataaaagcacatataakctaaatctcaaatctgcatttagaattaacagtgaatattacatagtttttttttacagtattctaactaaattttcaaaacagattaaaagtgtctgtgcatgcatttattcatgcaatatttattgaccatttaccatgtgtaagtcctatgctatgcactgggactattagtgctatgaccctgaactaaatctattagtttagaaattatcaataataattttactcttacataatctagtgtattgtataatcaaacrtgtaacagcagttaagtcaaaaatattcagaaagaaaaccagggtcaacctgaagactgaatgtatgtttataatttttaaaggagaatttttctgtgctatatagttggtggaagtcaagtcaactggaacaattgaagataaagtatgtatgtaaatactgttaaagttaggaaaaacactaatgaaaaagtttaatggaaagttgggatctagttatgtttraataaagaatgtttcagttaccatggctacataacaaattatctcaaatctagtatttacaaaaaatactattttactaatattggattctagtaaattactgtcacggattctgaggttcagcatggcttgcctcttctccacaatacctagggttatacttggaaaggcttgctggctggaggctggaatcttcagaagacatctttcctcacatgtgtggttgttgacgcaggttgttggctgaaacctaaaccgagctgtgcattagaactcctaaagtgrcctcttcttgtctaattcatatcttaataatagttgtaaactcagtaatagcttttctaaaacyccaatttaaaaatgggcaaaacatgttagtttatttagaaatatttttacctagaagtttatttagaggaacctggacccctggctcatgattgggaacagcacctctgaaggctgaatgtctgcattgaacttgatggagtaaggataaattttactctccactgacatctagagggggtgtttttggagaggaagatttggacttctttctagcatggtggctgacagcaaacatcctcagagaacaaagtgaatatgcctagcatttttacaaccagaccttggaattgtcatggcgtcattttagcttattctattggttgaaatagtcacaaaaatctactctgctgaaacacttggggttaggggtggcagcacattaccatgggcaatgggaggaaaatcaagatcacattaacaagagcatgaaagacgggccattttggaagatgcaatcgtccacaaaatgtgagwatttgtcatcggattatatgaatattgatataattagcaattggtrggtctccttttggaaatayagtaattgacatgagagctaagtgaacattacaaaattggccttaaataattaggtccccagcttagtcaggagtctcattaatcattttmattctataggaaagtttgccattaatattcaggtcatacaagcaaaagcagatatttatagatagccagaawcgcactgtttagcagacatgyattcataacattatgtgctaagcactaactacacctagtaaagacatcatgttttccacataaaactactatattaagtactctgctagtatgagtattttcttttaccacacagtgacctgtattttactttcggagaaaaattttttcagcttacaaaatgttagctggatatttaccacttttattaccttcatggaagtccarctagactaatacgccttttgaagaatgagctaagatgaggcatttgataaatttcttacagctattgttttccctgatattatttttatggcatggaattaaacgttacaaaatatcagtttacaatgactggaaaatccaattcccttaatagtgaagaaggtaaaatcttccaaagagtattacatatctccaagcacaatataccttgatagatatacagcataccttttccttaatatagacaaaattcagcatattgtggcaataaaataggaataccaaatgtgtcttttgccagtatcatttcttgaggtggctacagtcccattcccgtttctctttgaaagaactaaattcaaagtgcacctaayagagtggtggttactcataaatctgttttatattccagagtgttggaggagtggggagagagagtagtttcggctgatgggatattggtagaaaaaatgtaagttatttcattaaaggtccttcttctcttgtttgatgtccaaatggaagggatttgtagaagacttcaggactccagatgactctgaaatacttagcaacagtagaagataactacataagaggagcttggaactttggctcaccatggggaagagcaccrctgaaggctgactatatctgcactgaacttgatggagcaagaataaattttactctccactaacatctagggggttgtattttacagcaattgccaccatcatcaatatagctgatactgtgagacagaaggtaaagtctgaacaagtttatagcctcagtgcaagtagctgaagaacaaaaccactaactcygtgtgaagaaggatatcaaggttttttaaaaacaataaaaaatgatagtgttgtagacctagttacgcatcatataaaatcctcccatacctaccagcttatgtattcatcctgtctttgatcctggcccttgcctattttctaagggacagacgtaacgataactcagggacttcccaggtccagactactccccctgctctaccaccaryagaagtttggcaccctcatgcgatgcattggctgacaaggaaagacttaccttcacatggtcatgctggacccacgggtatctgcttctctctacccagaggggccaaattacacatcctctatgtgaaatgtgaatgagtcaatgctccrtggggcacacttataccaatgagaaaccaacgagaaacagaatatgagattttctctttctacaaaattttagaaataaaataagaaaaaaatagttcacctaaattaagcaaatattttcctataaagcacccacattttcttgcaataaatacattaacctggagaaatgtcactaacatgtcaaattaacttctcaattaataaaggccaattttgatgtatttctagcactttcaagctagaaataatgtgaatagttttaaactgaagtgttttacactttagttttacagttttacagttctggtaaatatttggcttctgtgcttttaagttactgttgtaactctgaagccatattttgatttaatcctgaaaggtttcaraaagaaatcatggactacaaaacttgtatagagtaactcttttgttttaagcaaataaatacaaygttaaaaaattctgcattggacaaaagtaaagcagtttagcttactcaaataaaacacagctgaatgatgatcagtgtattcttctatatgttattgtatcttcaacctcaccagacttttggctggtagtcccaacaatgtgtcctaaacttcatattacctgttttgatgttgattttcactgcaactgaccataaacacttcaagttagagactgttattgatattatttctctttttaattattaatgttatgtgaagtaacaagcatatagtagggaatcaataaggattagagaaattaacttaagaggaaaaatacacatctgaagctgaaataaaatactcagaagggaagtattacgggagatattttaaggacttgacatttcattgattaagatttctttttttcctcattgtgtagtatcaaagatctttcaaaaattacagggatatcaacatagaagaacatatttagaaacatcacataatgattccaaaatattgtctttacttttaagattttttagaaatctctctaacataaacttccttgggaatgggatcacttaaggataaggaactttggattgctgcagagccataaattacaaattccaaccagctgacagattgaactttgaaaataaagaaaaatgcaaacccacaagtttaaaatgtaaacatgttgcccaaaaccattaaaaagtcagtttgcatgatactctcaaggttgttttttaaaaagsctgtctgttaagtaaagacagtattgttcaccctttgaagctgattctcaagaaggggtgcccttctgctactctctatgaaaataaaaatgaaaataaaatataaggttttatttcctgcttagagttgtcctaggcctgtgytaatgctttctactgctttatttctaaaattttgtatatgaagctattgctayrggaaatcttttttttcttaagactttaatacctggtaatcacactactgtagaattacttctctataaggaccttatcagtaggatttagtaggcaattcaagaagataacaagccatgaaaagatttggaatttttctggctatgagataatcaatgatgttctataaaattctgggaattatatcattttggaactacttgctctgtggttgttattgagtaattttataatctgacttttagacaaatcaccacattcatttattgatacaagatttagttatggagtccttgttttacacatgacagcatgctagtgggctcgtctgttgattgaagggagagtaagktacagacctggacattaagcgacctgcagtttcatagaggagatgacacrtgagtccaattacaaagacatttgtaggaagttctaagagtctcactcaaggctctcatgtctgctcttcttcctctacacatttgtcttttcctctctcatcattcaaaatttcatcayccatccaggatagcgtcagaagttccagrcaaatacattcaatttttaactacaattttccttttttcaagttactctgttaatcttcttccactggaactctttctccacttccctgaracttatatctcattggctctctctactttttctacacccactattcttttctccttatttttcaacccatcaagcttagatttcatgacccaatctttaattacttggagaatatttgatctctctgaattctgctcttccaagaactctggcaaaaccccaaaycagttcatacccactttctttttgccagcacctgtaaagctaagcattgagcataggtatcaatatgaagctacctatttcaaactcaacagagttcaagtaagttgattatattacataatttttctackaggtagcctagagcccattcaaattcatcytgttcaaaaataacactctccctgggagaacatttccccctgtaagtttctcgttttatgtcaaccccatctacctaattacctaagccagaaatctatgtgtcactcttgattgcattgtctcccttacttggcaatttcaatcaatcataagattgagtcaattctggtagacatatccatctccttttctaaaactgccctgttacctcttggtcaagccatcatcrtcttttgtgtaggtcatcggaacaaagtcttaattcacctccttgcttacagtctgctttcttgccgatactttctatacgtcaagtcctcagtaacatttggaaaatgcaaatctgataattacttccatgtgctaaaaagaatttaatactttcccatcccatttaggaaaatrtcgcatctcrtgaacacttacaagcactgtatcctttggccacacatacttattcagtataatttcttattgctgtctcccccttttgcagtctatayctggcaatgctgatttttttttttttttaatttaacttcttggattatacttcatcatttcttgcttctgaaatttttctttagctttctatttgaccagacagtgctttcttcttctctttgtttaactaaattctatttaccctttagactcattaaagttttcttgaaacatatggtcttcatatcattataccaaacacacttccaaattcttacttaatagccacataatccactagaccattggctctgtgaaggcagaaagtacatctaatctgtcccggcctctgttttctgggatttacaggatgtttagtgaatatactgaaagaatgaatgatgaagaaattcttacgaggaagttctattcattataatagcgtggttggaaaagtgggttaataccttttaatgatagcagtgtaatcaaaggcattaaatactacaaacattaaagaatagtrtagaatgttattaagaatgatataccaacaaacttgacaaaataaaacaaatagacaactttcttaaaaaatacaatttatcaaaattamcaataagaaagaaaatctgagtaatcctaatctccattaaggcaattaaatttgtctccataaagaaagttccacgctgagatagttgtactggtaaattctgtctaaaactaaataaataaaatcaaggttatacacactttttcagcaaaaaaagaggargagggactattattatataagatcaggctaatactacatgaaaagktgaaaaataccttaaagaaaaagaaaattacagaccaatgtcagccataattgtattgttatgagttgaattgtgttctactaaaatgcatgttagaattctaacttccagtrcttaaatagatctcaagggatttattckgagtaaaaaaaaaatctaaaaatattacatacttcaatattctattaatacaacattcgtttcttttttaatagctttaattatttttgaattataattatatataattataggagacacagtcatgtatatatctatcatatacagtgtgagatgattgaatcaaataagtttatatatctagcaccttaaatactcattatttactcctcctatttaacttcaaattgatcttttgactgacatatcatcattcttcctttcactctcatccctgcctcacctccaggctctggtaacctcttttctattatctgcttcttagattgttttagttttgcatataagtgagaacatgcagtttttctcttctgtacttggtttatttcactttgcatgatgtcttccagattcaactatgttgttgcaaatgacagaattttcttcatcgaggctgagtagtattccattgtttataaataccatgttttctttatcaattcatctgttgatggacatagattgatcccatgtctattatagacaatactgtgatgaacatggggaatgcagatgtcttttagatatacggaattttttagaaatctcagaaatgggatttctggatcaaatggtaaaatttgttctccattttttataattttgtcattttaagaacgccatatttttagtttttttgaagaatttctattatggaaaactgtatagaggttcctcaaaagcctaaaaatacaacattattgaaatgaaaaaactatggacatggaagaacaaatttttgttttccagggtttatggacatyggaggtggaaggggatggatgagactctaaagaggtcgcgctgtaagatctttgtgttatcttgattggagtggtcgtcataccaatctaacagtgataaaatgaaaahatacatacatggtattaatgtcaacattctgttttttattgtatagagttctgtaagatgtaacctttggaagaaacttgatgtaagttacatgggacttctctgtactatcttcccaacttctaatgaatctgtaattatttcaaaactaaaaaggtaaaagtagtatttattkcaaagagccagtattttaatttattgtgaatgaatactatggaaaaatatgatgaaaataaattactagaaaactaaaattaaacaaagatacataaactgcaaaacctttttgtagaatcaggaatatctctccatttttatacatataatcagaacaaatatggtatatgaagaaaataatttccaaaagactrtatatttttattaagagtatayacatagccattaatattgagaattgctaatatactatttgtctttctacaatctcagctaaacaaaatgtataagtgaaatgtgatttcattcaatgaaaacttmtatgcacactttgagaatactttgtataaacacatttaaagattttgatatgaataaatgcaaacagttcatttcttccgttaacatgtctaggctacrttttattcacaacgttcatttactcataattatctgcactatttctaggttcctgttttagtgacactcattgtgcccaaaacaatctgtggagctgtattgttagaaacagagcaagagcctttaaagtaatttcatctagctcaccatgtatgtttttaactgatatccaaaaatgaagtaagtgatgatgtgctttcaaaacacaacttcagtgattccaccagtagctagttctataaatttatccttattattaaatttgaattatctttcaatgagaatgrttttcagatccatgcatttcttatgtgtgacacatttttggtaaaaaaaataaaattccaaacccttgattaaatgtttggtgataaccttttgcaggtgttcaataacaacattaacacctacctcactggtaattgttattagcttgccataaaaccagattccataaattctcaaagtttcattttctgtcattgaaaaacttgttttatttctacaatgcctaaaaatattaatatcattaaatacatactatattccatatataaactgtaaaactagattccataaattctcaaagtttcattttctgtcattgaaaaacttgttctatttctacaatacctaaaaatattaatatcattaaatacataaaaaatatcagataaacaagtaaccctgsctatcactgaacagctttaaattggtrgaccaaactggtttcttaagaagtgaaacattaaaagtttattcagtaattgaagtgctttccacagaactattgctctccatgaactgcatggctctttatgaaataatttgagttcgtaatcagcttccatattattacttgatatgtaaaataatcttgaatttaatgtattgacatttacttaactcacaaaattttaccatgccatcagtgactttttaaagctgacatttaatgccatgcaagaygtttttgataaagaaaactgtgttgatttgcattttaacaaaagcaccatatctgggtaaccattcaagaatgttttctgtaatagatattatgccacagaaacatgcatgtgaaacgtaatctctaaactacaccagttgacagttcatatcatagggttcagatctagtcagtttacatgagcgatgaagaaaaaagttccataatatcaatataatgttgaaaatggactacactaaaagagttgccatgttagcagtatcagtgcattagtctaatcacaatgaaaaacactttactagttttacttgttcagtgagttggtcttctagatcatcactcagctcctgagtatacagtgttactgcaaagtggtatttgattgactttgtaatacagattcacattgcatttccaaayaagtatctttgataccatacttcactgtctcagcaattgtatacattttctttagyyagcaacccaaagtgctgttttacaataagacacatagcatcaatattcatatgtgaaatgttgagcatctgcttctgtaggcttttcaattaaatactcttatacagagaawgtggttttgaacacttttatttatatcttttatgtaaataccacataggtgttcattgtttcatcccttcactatgcaatgcaactccacaaatgaggcaccatagttttagcatagtatcatcaattatggttagaaaactgatctcaatgtactaggatacgtacttctaagtaaaacaagtatgaactctttttggtctttagcttttccctactgtttttcttcaccattatttaacctaaaatgtctgtagctgagaatctatgccttctcgtaacaagcccagagaaacttatttctctccgtgttaattggcattaaacttaaataatgtaaattgtattttcttagtataactaataatgttacattataatttgaaaaacaggcatcattaaaaagtaaagtgcacctaraaatttttttaagcatacaaaggcttacattttctcaaaatttgacacacacttgggttatartgcacaaactaaccttaaagtgtcatttgttgctatgtgattctgctacatatgactagcatacagcttagatcatatgtgatccacaacaattaactgtactataccctggtcagaaataatcccattgatcaraaacctttatggcctggcaatgtgaaattgctgcagatattttgaaatgcttactctgaatgcttatatttatcttgccttagagctctccaccaatgccagtgcaggagatcatgctctgagcatccaaggtctagagggcggagcaaacatttaaaaaatgctgcaaacatgtctagctacatattatgatatcagtataaaggaaacatacagggtgatgggagcaaatattatagggatcctgtttacattaaagggtcaggaaaagtcctaaggaaagatgaatgggtgagggcagccttctaggcagaaaatgaggagacatcaaaatgcatgtgctctaggaagggaaagaagcctagagttgctctaggttgtgagacagaggaaaggcccaggaaatgaacaagaagaaaaagaagagcccaggcactgtgtaccataataatgaggctagatttttcctaaaggttgagaaatgacattaaacaaaacatagcaggttgtggttgtgagggaagataatcagatttgacccacgtgggactgattgacgagaactctgttagaaggagcctggggcccagtgttccactgattgtagagcgtagtgggtgggaaagagaccaaacaggaagccctgtttttgacttttattttaagttcaggggtatacgtgcaggtgtgttacataggtaaacttgtgtcatggggattgttttaccaastatttcatcacccagatattaagcctagtacccattagtaatttttcctgatcttctccctcatcccaccctctaccttgaagtaggcccctcagtgtgtgtagctcccctgtgtgggtccatgtgttctcatcatttagctcccacttataaggtaacatgtggtatctggttttctctttctgcattagtttgctaaggataatgacctccagctccatccatgtccctgcgaaggaaatgatctttttctgctttatggctttatagtattccatggtgtatatgtaccacattttctttgtccagtctatcattgatggacatctaggttgattccatgtctttgttattattaatagtgctgcaatgaacatacacatccatgtgtctttataatagaacaacttacagtcctttgggtatatacccagtcataagattgttgagtcwaacggtagttctgtctttaggtctttcaagaatcacygcactgtcttccacaatgtgtgaatttatacttccascaacagtgtataagcaaacgttccttttttattccacacccttgctagcatctgtttttttgtttgtttgtttctgagaccgagtgttgctctgtcactcaggctggagtgcagtggcgtggtcttggctcactgcagcctctgcctcctgggtttcagcaattctcctgcctcagcctcccaagtagctgggattacaggtgcatgccaccacgcccagctaatttttgtatttttagtagagacagggtttcaccatgttggccaggctggtctckaattcctgacctcaggtgatccacccgccttggtctacccaaatgctaggattataggcatgagccaccgcgctccgccttgactttttaataatagccatctgactggtgtgaaaaggtatctcattgtagttctgatttgcatttctctaatgatcagtgatgttgagatttctttttcatgtgattgttggttgcatgtataccttctttggttcttttggttttatatgaattttgaaataaattttggacaatttgtttatactgtgtgtgtgtccagttgtgattggaatatattgtagaaactcaagtaaatatcttctaatgactcaatgaattgatttatttgggatgctttataaaaagtataactttttcctaatgcagaatgtcctagtagaaataaaaaaatmcagtatatcaataattcctagcattcccaaggaaggaaacaagtaatcgtattaagtaaaatgataaaataatacaagtcttaatgttgatgcccaacatcaagccatttttaagaatcacaagcagtgcagcagtattattgctgatgctttaaagctgagccatattttcttagatatttataggatggctttgtaggtaaaatacaggagtaaatacctgtgctaggttgttttatcgtgcagttattcattcttcctttcctgtaagaaaattatacattgttgctcattgacatcaggcttaaggggccccttatggacagaatatatattctctgctccattgatgtttgacctgactatgtgatgtgctttagtcartggaataaatgtaggcacgatgtatactgtttttgagaagaaactttaaaaggtactaatgaaatttctttgcctgtttgtttctgcyttctgtatgggtcctggaataaaaatatatggatgaggattgcagctgacttcagcctacatgcagtttgaatatgaagtaagtgttgatttattattgtaagcctctgagattacatggatggttgtttccccagcaaacctggctaaaccatcccgactgctacaatttgactaaataaatgtagtatgtatggcagagacttcatcatyatttgtttgttgctgagttttcagttcccagayggtagtaacacatagttataactcaatgaatatttttggatgaattaatagaatggtgaaatgagagaataaaataagaggataagtaccttcattacggggcacattttgaaagtcaatttagcaatagaaaatgaagctagatatagaatgaggtcacatcagttgagtcatattttatgcagtacaaaataattcagaattgtatatttttagcagatttttcattattcttcaactcactttaatccgttgcctccctctgctaggcccctatatgtcttctcattgtatatatttaaggtttaatctttcttgacatttcatccgctttcaaaaatgttcaccactacctttttcaaagtaacttgtttcttctaaaagaccacrcatccgctgatttttctatttactcccctgttctcttcaggcattgagcgttgacatttcattctaactcctcttccttagcagtccatactcgctttctggttgacttaatatataatcacagcttcaatcctacctattcagggatagctgatacaacagcacttctaatatttacctccagcctgagctataggtgaatgatgtctatctttggcaactgaaactagttttgcttttttttaagacacgggcaaagtcacaggtattgtacattttttagagattgcataaaatgagttgttccaataaaatgatgatagaggtagaatccaaataagaataakttgaagaattaaccagtgatgaggaaacagaaaataaacacagatatcctggatgaagtytgtgatrggatacagagacaggttggcagcagtaagggaaagtgaatatttttcaattcaagtacattccacatttgcatgattggtagcaaaagaaaataaaagctatcaatagcttttataagagttaattattatgttagagggctaagcactacaaaattggcatgcattttggattttcccccaatttgatactcaaaacaaattcttgccaagttgtaaaagtaaacattgtatttatgggtttgttattattcatagattcaatatactgactgccattcattaagccaactgaacatgtaactaaggcctccccaagtttaaaaagcataattatgaggtatagagtaacatataatagtatattccatatatctcttttcacctggatatgaacatctaaatttacatgcttgagatacttcctgggtgtgattgtcaattttatgtcgacttggtgcctagacattgatgtgaaagcattttttagatgtaattaacatttaaattagtagcactgggggtaaagctgattaccctccataatgcaatgggcctcattcagtcaggtgaaggccttaagagaaaagactcagccttcagactcargactgcaacatcaatccttccttaggtctcyagtctattggttctgtttctgtggagaacactgactaacacactgggattctcttgctttgcaaacagaaatgggaggcaatttggaagggacttataaagcttttaagacacaggcaatgtggtagttctattcacttaacaaatattctttaaaatatactttctaatatacattctctgcagcattaatgatatmttccacaatacgattaaattaaaaaataaaaattattttaaaaataatttcaaaataaaattaaaattaaatttgatgttcaatttcaagatgaatatataatatacaatatataaaccaacatctatttatttcatttatgaaaycataccaattctagttgtccctctgtataaaacagagaaggtcttatagaatctcaggtatgacattttggccatgtgtgcctaattttcctccctccctscctccctccctccctscctccctcccttccttccttccttccttccttccttccttccttcctyccttctttccttccttctttccttcctttccttcctttcttccatttctgcttctgcttctgcttcttcctcttcttctctttctttttttttttttttgagagggtgtctcactctgtcacccaggctggagtgcagtggcaccatctcggctcactgcaagctccgcctcccgggttcacaccattctcctgcctcagcctcctgagtagctgggactacaggcgcccgccaccacggccggctcatttttttttttttttctttttttagtagagacggggtttcatcgtgttagccagggtggtctcgatatcctgacctcatgatccgcctgcctcagcctcccaaagtgctgggattacaggcgtaagccaccacgcccggcctctctctctttctttctttcttttctttttctttctttctttctttctctttctttctttcttctctttctttctttctctctctcctttttctttcttttcttcttctttcttttttctttcaaattttttctatttttttggttactttagtaagctttttagagataatctttagaatacaatgaaacatgaaataaaaataacaatattcttcaatgaaggtaagtaatagttgaatagtcccttactatattttctttacccsttttctacaaaactctatgtaattctgtttatcgatccgtcaattcttgctttgagctagatggtaagatatttacttctctatagagtaaaccttaatatttagcttctaaatatcaatttttaagccagcttgaggacagccctttaggtatatctaaagcaaataattccagtaacattgcagttcactgggaaaaggccatcagtgtgcctgtcattcttgtaatcataccatgtcatrtggtttggctctatgtccccacccaaatarcatctcaaattgtcaggggagggacctgyggggaggkgaatggatcatgggggctgtttcccccattctgttcttgtgataatgagagacttctcatgagatctgatagttttaatagtggcagtttttcctgygctctcacttctcttctgctgtcatgtaagacctgccttgcttccccttcacctgccaccatgattgtaagtttcctgaggcctcccyagccatgcagaactktgagtcaattaaacctctttcctttataaattacccagtctcaggtattttttatagcagtttgagaatggactaatatataatataagtagatcctccccagaaagggctggcaaaggaccttttacataaacaaacggttagacgggagagtttcccccataagtctcttcatcttagccatcaatagcccaagactattaaagraaaggcgaaaactggtaccagaaatgattcagtttcattcttattctttgttaaactcrttcccaaagtgaatgagaaagccaatgaatgaaagccygaatcatagggtttccaccaaagatgccagttttgacagttcctcttgtctcttggaagtatctaatttagactgctccattagtaggtcaagtgatgtttaaataacactgttccagctgcaaattgattcagtttactttttaaatctccaaatgttcttgttgcaaaraaagtttggagaccaggcgtttgcatctgtaatcccagcagtttgggaggttaatgtgaatggatctcttgagcacagggagttcaagaccagcctgagcaacatggtgaaaccccatctctacagcctaggcaacagagtgagacactgtctaaaaaatgtaaaaagagaaagtttgtaatttctaactctaatttttaaaattatgtcaagaactgattttaaaaagaacagattaaaatggaaataaaaaaattactattacaagtgtacacatatatctgtaacaattatactctagtaatgagaggcaagctcttagtagaaataaaatatatttctactatgtagtcacttgcttttgttgcttcctgtggaattcaaaatgagtcaaacaaatgaaattgctgaatcattggcttgctttttctatgcaaaatttaagaactaaagcttcgtgatgatcaaatataacattctggactttattacattaaacagtctaatacacatttggttttatgtttattaaaatgaatttcctttagacactttgaatttgccttctctgagatccatttatgaattaggctgtttggccaatgactagacatcaaggaatgaatgagagaactgttttcatttgcttcggtgaaaattcagccacattctttgtatggggttgatttgtttgccatttctaattccctgttactcctcattggtctttcaaagagagayatttgtgtaaatgacaatatgcaattatttcataaaaagtaatatatccttccaaatttttattaatgactttgaattgtcttttgtaaattttttggatttgtcatattttttccaaaaacctgtaatgaagaaaatagatatctatattctaagtcaattcccaatagaaacgatataactttttagtacaggaacacaacaggtttaactactttcacatcagtttcaagttgcattyctatatttaaggcttcattacaaacatacatgtgtccaggcaatactcatattctcctgtaccattgaaatgagatcaaaaaagtaaaaattttcattctatttcagctttcatcttagtaaaaaagagtagcagaatggagtaatgtccaaaatctagttccaggtgcrattattatatatttctaaaatttgcagaaatgaaaagaatattttcagccttttagaacagatcattatgattctaaatggctagcaccractatgctaaagacattatagcctgtgatatcatgtgaaaaacaaaataattccagccttcacgcaaaatgcttctgatgtcattgacctagcactgttgtttattgtctataaatgatcatttgctgtaaatgtatttaggctaaaatgaattatttaatgttaaaaatattctaccygaatatatttttaacacattaaatatattatttataagtaatatagatgcttatttacttacaataggattctgtccaataaagtcatcttaaattgaaaatrtagtaagtcaaaatgcatttaatacatctaacctaccaaatatcatagcttatctacactagcctaccttaaacatacccagaacatctacattagcttatgattgggcaaaatcatcwaacagtaagcctattttataattaagtgtgcaatagctcatataacatattgaatactttactgaaagtgataaacagaatgattgtatggaatctaatgaatgcttatcacttttgcaccatcataaagttgaaaaattctaagccaatattataagttggggactgtttgtattatatattaaatattataaatatttaatggaataaatgctttgtgaacattttagagtaagtttgaattactgtttctctgaatgactygttttgagtagatatarttataaactgccataaaaacagatcttttatatgctaactagttgcatattttttcaagtaaaattmtggtaaccaataatgtggttaaaatactcttgtgtaattgaaagaaatgcgcaaagacccaggtaagttggggctatgtgtaatctgtactgctgctgctggttagataattttttaataactttaaaacaaagyaaattaaacaacaacaacaactaaatttgacattcaagatttagacctgctatctctgactttaacttcttttttttgtggggggacggagtctcactctgtcgcccagagtggagtgcagtggtgygatcttggctcactgcaacttcagcctccctggttcaagcacttctcccgcctcggcctcctgagaagctgggactgcaggtgtgaaccaccatgcccggctaatttttgtcttttaagtagagacggggtttcaccatattggccaggctggtctggaactcctgaccttgtgatccgcccacctcagcctcccaaagtgctgggattacaggtgtgagccaccacacctggcttgacttctaaaaaaataaaaactaaaatataatttagtatagtttaaaatcaattatctgccctgatggtgacatagttcttcaatgaaaatcaattaataaattattcattctaaattttgtcttttagctaatttattttgttaaaagtatttttgtattaagctacagattgcctgtttttctcactgttctcttgattttataaatgtattctcttgattttatgaatatatatttcctagattttctaagagattgacaaattatgaactctttacccacatagaattcatgctgtttaagtaatttcttctacatggatatttgtttagcgtgtacacaggagttgatataagcctttgtgtgtaaagaaatgcattagaaagagacttaagtgaagattttcagtgcacgaacttgtatgggttcacaacaagcctagtaatctcttaagaaagaatctactaagtctttcaaaagttttgattataaggctaaattaatgactgaaatttaattctacacatggctaaataaataaaactgttagccagacaataatggggctgtttttccctgtaaatccttcatatctttctaataatatactgtgtgaaaagtttttaaaaatgtgttagagaaattacagtagtatttcagttgggctacatgtatgtataattaaggaaatccagcttttaattttattttagtaatttaaccttcatgcgtaatgcatttgatgcatttctataaactttctcattatgtattattaaaaatatatcctcagcttcctttataaaattgtccataaaagagtatagataagtaacagtttagtataacagctaaacacacagtatttgaagctagccctccaagatttcagtcacgcccagattttgctagctctgtgattttggattaggccttccccaacctggcctcaggttcctcatctgtgcrggggtgagtaataacagtacccacctcagagccattatgaagattgcagtagttaatgtagctgccatacatgaggcagccatagtcatacctcaccaaaaaaaatagcagtgttttccaaatctcactggctggggaaagttgcttaatgtggaagagaggaataaataaggagaataattttaaaaataataaaaagcagctgccgggcgcggtggctcaagcctgtaatcccagcactttgggaggccgaggcgggcggatcacgaggtcaggatatttgagaccaccctggctaacaccgtgaaaccccgtctctactaaaaaatacaaaaaattagccgggcgtggtggcgggcgcctgtagtcccagctactcgggaggctgaggcaggagaatggcgtgaacccgggargcggagcttgcagtgagccgagatcacrccactgcactccagcctgggcgayagagcgagactcrgtctcaaaaataaataaataaataaataaacaaaaaataaaaataaataaawaaataaataataaaaagcagtaaaagacaaaagtgaaaatgttgtttctagagggagatagtatgaagattttagcactcaaaacaagcatgrcaaaaatagtatttgtgagtgctttcagcaaaggttgaaattggcagcagcacaaagggtaaaaatgtgtttaagttggagttccctcagatttgatgagtatagaagataggaaacatgctccagtgaaaggcaggagcataagtatcctaattataccagcataatctgacttgcaaactggcattattctttttttcttaagaaattaatgaaattacaaataagttgattcttcagtgtatttttttttatgtttcatattcaggtttggttgtgtgtttggagggggcattaaatatcagctgccccattctgacaacaaccctacaaagtaattagtagtattctcctcacaaaggaaaaaascaagtctcagagaaggaaagtaactttcatcttaaaagcaatggggaagagctggtttatataatggtcaatttcaaatatttgaacagtttaaaagatcgggatgcaaaaatatcgtataggctatttatttaggagataaatgtgtattgttccttgctgcagcataactgttgaagggcatatgacaaaaaatgaaaaacatattgacactgaggtagatttactccgtttttataatccaattcctaaaacatactcacatgtgtaatgttgatgatgtgatctcaagaagattatttaatttcttggagcctccattctgttaccaataaaatgacaagaatatttacttaaaattaatattactatgaagatgaagttacatgtatcaaccagctagcgcgtatcaatagttgtcgcttaataagtcaatggtatgctccttcagtctattattttttttcttattacctgcaatgttacatgcttatctggagtgctggcttacacttctgttacacgtgggacattgtgagatttatgtgcttgttgcaacatctctgttcatccatttttactccgtaagctcaatttgatattgaaccatatggctataaaatgtatatgcatgaatgcatgtatatcttcttgactctttgcatgacataatacatattttctcttagatatttaatgtaatgactattgtttctatgtattttcagctaaaatataggtcttcatcatttttttaaaaaaattatgttaattttatgtacacaacaaataactgaatatattgtccctgtaaaaatactaaatttttaaattaatgttcatcacctgcacttttaatagmcattatttttagggtagtttttgtttcactggcaagttgagaggaaggtacagagactccccacataaccctgccaccatgcaggcacagcctgcctcattatcaacatcctgaccagagtggtacayttgtcacagctgatgaacctacacagacacatcatcactcaaagtctacagcttacattaactctcactcttagagctgtgtgttttatgggcttggacaaatgtatagtggcatgtacccaccgttacagtatcatgcagaatagtttcactgctttaaaaatcctctgtattccacctattcctcccttcctccccttaaatmcctggcaaccacttttccttttaaggtcttcatagtggtgtcttctttgccggaatatcatagagttggaattatacagtaggtagccttttcagattggcttttatgtagycttttcagatttagcaatgtgcatttaagttgtcttcctccatgtatttttgtggcttgatagtgcctttatcgctgartaatatttaatcatctgaatgtacttcagtttatttatccattcttctactgaaggacatcttggttgcttccaagtttggggaattatcaataaagctacagtaaacctccatgtgcaggtttttgtgttgacataagttttcaactcatttggataaatgtcacagaatgtactgggtcatcatctacattttattatcagttcactaaaggataataatcttaattttcttayatacagaatttaagtttagctaaaatactcattggtaaatatttgaatctgctagtaaatagtagtttcttatcaagtttttaaataaggaatgtaacatgtttcatgataytgcctataacctttactttgattttaattaaccttttgtgaaaaagcatagtgrcataaagtgacattttagatatggtggcatgattggaagaaaaagaaaaacattcacaaccagttattgcatgkctactattttcctagcattttcaaacagatgtatagaaaagttgaataatctgatttctcttttagaatgaagmagcttagggtcagggaggcggaataatttgtcataggtaatgctacagttccatctgtctaatcccaggttcattttctttccaagacataatattcaccactttgaagggaggagatttctgcttcgtttgtttatgtcagcttttttccacaaagagttttgaaaccacaatgcccatgtgtgtatctcatgtgtgtgatttttctctgtggaagttcagggtagggctacaaatgatttcataayatgcaagtccggaatataaaccatatggccatattttatgcttgcataaatagatcatgttatctctacacaacagtagcagtacgtgtgtaattacatattcacacagtagtcattacggtaatagtctttggcctaaaacacagaaaatcgtaacagtgcagctactcagaagtaatatgtgacattcttttacatttttgcttatartagaaatagaatcgtaaaaatacaggatttttggaaattaaaaactgtgtttcaaatgcaaagcatatttataataagaaagactacaccaatgttttmtataaatgaaacgtactatgtttaagaatgttttcttagctatgccctataatttatattttctcaagtgtttatccaaagtttgtctgctactgcagtaaacatgctttgttaggaataacaaatgctgctactctttcactgtttataatttcctgcagcattcaaatttagagttgcttgaataaataatcgctaatgtcagaaatatttgttaaaattccttcaattttagctaagaaaaggaaaagctctccwaagataaaggacagttccaataccgataggtaggtaggtgaggaagagatgtcttggaaaagcctcacccttgaattattctcagtgaatggaacttaactgacctcacctgtgaaagtgaaacgatatatcagatccagcagtggccgtgattactgcaaattgcaaagtaggaaattcttccaacaacatgagattttgtttatctaaataccctgttcaatgccagagacaagtggtagatattagatatggaaatagataatctttttcgggggtgggggcgggacagagtcttgctcggtcgcccaggctggagtgcaattgtgggacctcggctcactgtagcctctgcctcccaggttcaagtgattctcctgcctcagcctcccaagtggctgggattacaggcgcccgccaccacgcccagctgtttttttgtatttttagtagagtcgggagtttcaccatgttagccaggatggtcttggtggctcgcgcctgtaatcccagcactttgggaggccgaggcgggcggatcacgaggtcaggaaatagataatcttactcagtaaataaattaaaaaattttgagaccagcctggctaacatggagaaactccgtctctactaaaaatacaaaaaattagctgggcgtggcaggcggctgtaatcccagcgactccagaggctgaagcaggagaatcgcttgaacccgggaggcaaatgttgcagggagcggagactgcgccactgcactccagcctgggtaagaagagcaaaactctgtctgaaataaaatagaaaataataaattaaattaaaaaatagaaaaacaattttttactaaaatagttttgtgagattataaaaatactgtattttaaagttaaatgtgacaaaatgaataatttatccagtagatatgttaataaagacaccaaacatcaaattctcatattgtttacctaaaaaggttgcctttttttctgaaggacatcagtaaagggtaatagatttgaatgcatttgagagtcctttgtccatgtttggatttgtttacagcaaatgctgacatgtttggataacgaattggtgatagataagtgagcactgagaaaaagtttttgcctatttagtagtaaatgatgcttgatctctttttttttttttttttttttttttttgagagggagtttcactcatgtaggccaggctggagtgcagtggcaccatctcagcttactgcaacctccgcctcccaggttcaagcaattctactgcctgagcctcctcagtagctggaattacttgcacctgccaacacgcctggctcagyttttgtatttttagtagagacgaggtttcaccatgttgggcaggctggtcttgaactcctcacctcaggtgatccgcccaccttggcctcccaaagtgctgggattacaggcataagccaccgtgcccagccacttgatcattttataatcatatattattggtaatatcatggaatgatttatttgatatgccattcaacactaaaaataaaataaatatttgataaaatatttaagcaacacaatcctatgaattgtacattattttcttgtgtaggtgtatatgtttgaaaaagagctcttattttaatttttgtttttttaaatttttatttatcattattattactgtttcagtttttgggggaacaggtggtgtttggttaaactgatcagttttttagtggtgatttctgagattttgatgcacccatcacccaagcagtttacattgaacccagtgtgtagtrttttatccttcatcccactcccacccttcccccaaagtccccagagtccattatattattcttatacctttgcgtcctcatagctaagcttccacttattagtgagaacatatgatgtttagttttccattcctgagttattttacttagaataatggtctccracttcatccaggtttctgtgaatgccattattttgtttctttttatggctgagtagtattcaaggtgtatatatatatatatatatacataccatattttcttatccactcattggctgatgggcatttatgcaggtcctaatttttgccattgtgaattatactgctataaacatgcatgtgcaagtgtcttttttatataatgacttcttttcctctgggtggatactcagaagtggaattgctaggtgaaacggtactcctatttttacttctttaaggattctccatactgttacctatagtgatggtgctaatttacattcccaagagcagtgtaaaagtgttcccttttcagcacattcacggcaacatatactatgttttgattctttaattatggccattcttgcaggagtaagttggtatcatattgtggttttgatttgcattttgtgatgttgagcattttttcatatgtttgttggccatttgtatatcttcttttgagaattttctatttatgtccttagactactttttgatgaggagtatgatgataatgattattattattatttatcactgacttgttttagttcctataagatcctggattttagtcctttcttggatgcatagcttgcaaaagttttctcccactctatggtttgtctgtttactccrctgattatttcttttgctgtgcagaagctttttagtttaattaagtcccatctatttatttttgtttttgttgcttttgcttttgggttcttggtcatgaactcttcacctaagccaatgcctagaagaatttttcaatgttatcttctagaattcttatggtttcacattgtagattaaagtctttaatccatcctgggttgatttttatataaagtgagaaacgagaatccagtttcattcttctacatgtggcttgtcaattatcccagcaccatgtgttgaatacggtgtcctttccccactttatgcttttgcttgctttgttgaagttcggttggctgtragtatttggctttatttctgggctctctattctgttccattagtctacgtgtctgtttttataccagtagcatgctatttgggtgattatggccttagagtatagtttgaatttcggtaatgtgatgcctccagacttgttcttttggttcatttttgttttggctatatgggctcttttttgtctcataaattttagaattttgttttcttgttctgtgaagaatgatgatggtgttttcatgtgaattgcattgaacttgtaaattacttttggaagtatggtcattttcacaatattgattctacccatccataagcatggaatctrtttccatttgtttgtgtcatctattatttctttcagcagtgttttgtgttttttcttgtagagatattttgcctccttggttaggtatattcttaagcattttattttattttttgcagctgttgtaaaaggggttgagtttttcatttgattctcagcttggtcgccgttaagtgtatagcagcgctactgacatgtgtacatttattttgtactcagaaactttactgaattcattgatcagatctaggagctttttcaatgagtstttagggttttctaggtatacaatcacatcatcagctaacagcaacagtttgacttctttttttttttttttttgagatggagtctggctctgtctcccaggctggagtccagtggctcgatctcagctcactgcaagctctgcctcccagtttgacttctttacctatttggatgccctttatttctttctcttgtctgattgctctggctaagactttcagtactatgttgagtagaagttggtgaaagtgggcatccttgtcttcctccagttcttggggagtgattttaacttttccccatttggtataatgttggctgtgggtttgtcatagatggcttttattacgttaagatatgtcccttctaacccaattttgctgaaggttttaattataaaaagatgctggattttgccaaatgctttttctgcatccattgagaggatcacatgatttttgtttttaattctgtttacttggtgtgtcacatttattgacttgtggatgttaaaccatcyctgcatccctagtaggaaactgayttgatcatggtggattacctttctgatacactgttgaattcagttagctagttttttgttgaggattttttcatctacgttcatcagggatatctgtctgtagttttctttttttgttgtgcccttccttggtttttgtattagggtaatactggcttcatagaacgatttagggaggattccctctttctctatcttttggaatagtgtcaataggattggtaccaatcctcctttgaatgcctgctgtaattcaattgtgaatccatccggtcttgggggcattttttttttgttggtaatttttaaatcacaattccaatcttgctgcttgtttttgttctgttcagagtttccatttcttcttagtttaatctaggagggctgtatatttccagggatttattcagctcctccaggttttctagtttatgcacataaaggtgttcatagtagccttgaatgatattttgtatgtctgtggcatcttctgtactatttcccattttgtttctaattgaacttatttggatattctctctttgtttcttggttaatctcactaatgttgatatagtttggctgtgacctcacccaaatatcatcttaaattgtattagtttggtgcaaaattaatcacggtttttgccattaaaagtaatagcaaaaagagcaataacttttgcaccaacctaatggctccccaaatccccatatgtcatgtgagggaccctgttggaggtaattgaatcatgtgggtaggttcctcccttgctgttctcatgatagtgaataactctcacgagagctgatggttttgtaaagggcaattcccctgcacatgctctcttgcctgccaccatgtaagatgtgcctttgctcctccttcactttccaccatgattgtgaggcctccccagccatgtggaactgagtgctctaatcttcattatttctttttttttttttctgtagggttttggttggtttgttcttatttctctagttccttgaggtatgagcttagattgtttattaatgctctttcagactttttgacataggtatttaatgctatgaagtttcctcttggcaccacttttgcaatatcacagagattttgataggttgtgttgctattaccatttaattaaaaaaatttttaaatttccatctggatttcattgttgacccagtgattattcaggagcagattatttaatttccatatatttgtatagttttgaggattctttttggagttaatttctagttttattccactgtggagtgacagagtacttaatataattttgattttcttaaatttattgagacttgttttgtggcctatcatatggtatatcttggagaatgttccatgtgctgatgaagagaatgtatattctgcatttgttgggtagaatgttctgtaagtatctgttaagtccattttctaaggtttagttttagttcattgtatctttgttggctttctgtcttgatgacctgtctagtgatatcagtggagtattgacatcccccactattattgggttgccatttatcttatttcttagttctagtagtaattgttttataaatttgggagctgcagtgttcggtgcatacatatttaagattgtgatattttcctgttgggctaatccttttatcattatataatgtccctttttgtcttttttaactatagtttttttaagtatgttttgatggatataagaataactgttcctgcttttagtttccgtttgcatggaatatctttttttaacccctttaccttaagtttatgtgagtccttatgtgttaggtgagtctcttcaagacagcaggtaattggttggtggattttaatccattctgccactctgtgtcttttaagtggagcatttaggccatttatattcaatgttcaaaatattttgaatggtaatttgatgatttaattgtaaaagattccaaaacatatggatcacattttcccagttttattacagttccattgggttttcaaataatgagaaaaaaaaaaacttaaaaaaaagaaacagacccaaaacatgtgaaaaatagcttcagcatttcaacacactcaaaatcagcaggatttgctcctcccaagtatgtaagtgacctaaatcacagtatttctgtatgagtacatattttctttttgtcartgtgttaaacatcatctattaggcataataacatcaagtgattatttaygcattcttaaaaaataattgaatagtaagttgtagaaaacacatacacacacaccagccttctaaacttctaaaagcacttgagaaaccaatgacactaacaactacaacttaggagacttggccaatcaagttttgtttggttgtggttgtttgctttttaaaatacctgtcaaagagaggaatgggctagataagaaaatgttactaattccccaccccttttattttgagacgaaatctcactgtcacccaggctagactgcaatggcaggatcagagctcactgtaactttaacttactgggctcaagagatccttttacctcagcctcccgagtggctgggactataagcagacaccaccatgcctggctaatgttttagtttttgactagatgaggtctcactatgtttccaagctagtcttgaaatcctgggctgtagtgatcctactgtcttagcctcccaaattgctaggattataggtgtgagccacctggcctggactgtatttttccccttaaatcctcttaaatgagaatacagttgtgtaaaattaaaattttagattcaggctatttgaaaatataatattaaaagcttgtctacttttacttgatttgcaagggtaattattttgatcctaatcatacttaccatataatttttctacagttataaagactgacgaatgcacttgtttcaaaaatgttccagactccatgaataacatgtgaaaatagtggkttttttttataattttgaagaaaatgtgcatattttatcttgaatttgagagacgagcaattttttttatctccaccatgttttctcagaaactataattagctagacccagaatgtccaacatgctgtggtttcctttcttaaagcttaagctaatatctttttacagtctctataatctttgggatacttttaatcttccctgtccaaattatgtttttgttgtctttgattcttcatttctctttaattccctacttccagaaatgctccaagctctgtcagtgttctagatatgagtatctgttatttcctttgcaatccctctattgtcattttagtcttgcttctcatccctttatacctagattttctcactatagcaaatccaaatgccatgattcacccccatttcaaagcctttgttcaagatgtttttcattactcaaaatctcatgccctgcctctcaaatgattccgcatatcataatcctagcgattaagagaagtggtggtgaaacactggcttttcacttattttggaacacatgaaattattttattcrttttgtgatgctgctttaaaatttaacatcatgctgagtaaatacaatacmtatgcatataggatttaactttcaactttggacagttttagaatctctgctgtacaattgaacatagatattgccatgtatattttttaagcaaacaaattggaatctataaaatagtttccatctaaagaatttcaaagtaaatttaactgaccacaacatttgttgtcacaaccagacagggtaagagctttgactagtttagttcaattataaataatatagctgttacaacaatttgagaaacactttgtttttgctctgcccatattattatttctttaaatcaaacgtttatcaaagacatcagtggaaagcatttcaaataactaaatattttatatacgtacatcatcttaaactaaagtgatgattaaatgctagattgttttttagaaaacttgaaatgctttaaaaattgttttagaaagctttaacagttatgtaaatatattttctaccaccttctaaacttacccatatttctgagatgtgggtgtacgtattttgaggaatactaactgctacctacatatgccctctgccaataatctcatctttgagtatacaaatttataggactctgaacacggcttcaaagctcctttattttctgtatttcaaattaaaaagtgactacactattctaaaccattcataacaactatggcagcttttattattattatttttattattatttttaagcagaaacatgagtcagtctgacaataaccatagacgaatgaggtaagcctgacatttatttagtaacattactgaagaaagactagcaatggcacttttcatctgacaaagatgtttcattttttgtttttgtttttattttttacaacatctgtgcaagaacctccaacagtgagaggtttaattatgkgaactgtaatatgtcttctaagattgttattctctgattgtactgaaattcttttaaaacaaatcacagcacaaaagaaccaaacacacacacaacacacacatacacaacacataagattaacaagcatatatattcttcatctgtatgttattttaactactgtggaagtaaagttctttccagaaaacacacaatcaaaagaacaatgctagaatttcttccaatgaattcagtattctaataacaaatctaaagargctctattaagtttttcttaatattaagggtctattaagaagtctgttaaggccgggctcggtggctcacgcctgtaatctcagcactttgggaggccacggcgggtggatcatgaggtcaggagatcaagaccatcctggctaacacggtgaaaccccgtctctactaaaaatacaaaaaaaataagctgggcgaggtggtgtgcgcctgtagtcccagctgctggggaggctgaggcaggagaatggcgtgaacccgggaggcagagcttgcagtgagcccagatcgcgccactgcactccagtcttgacaaagcaagactccgtctcaaaaaaaaaaaaaaaaaaaaaaaaagaagtctattaagatagtttttcagaacacaatacataaaaatagagtgcacattattgcatgcacacacatgcacatattcactctcataccaaaagtcttcagcgatcacatcatggtgtgtgtgtgtagtyttctctgccttgcagtttcagtttcattattttacaatacattctgttacggaaggaagaacgtaatctgggtcattgatggaatggaataatcgtcatgtcaaactaaaatgcatcatgcaatgtaaagaaagatggcttaytaacagaaggaaagtgatgcagcttccttccaattagatcctaatgaaaaatgtaacatatgcagtattttggaggatttattatgagttaattagaacatgttgtgtaggaactaataatgaataactcgaaagggtttatagtcacagctctgtgagtagctgtgaatactaaagttcagcagcactaatctcaaaggaaatagtaggagaaggaatctaagttgtcattgtgatgaaataaaatagtcgcaaytgcagctggaccattaactaatattgactcttgctctagaagctgtcagagctctgcattgaaacagctgggaatgttctgtcagggagccacgggagaaacattttacttgggttgaaattcaaaacttgatatttgctaaaaacataagagccatatgtttactcgtgagtcagacaaaactaaacataactttttcagtgtattctagaatgttttcttttttctttcatcacacatctattaagcatttacaaagtgacaagcactgtacgttcccaaaagtgcacaaattacacaccaaccctgctgttttggaaattgcaatctagaaaacatcgaattcatcatttaaaggtttttataagaatggtgatttaaaaaaaaaaacaaagcctcattggttgagtaggctaactgctttaaaaacagatccaaagagatagaggtggaagcaatggaagttttgatcccattaatattttaatcttgggcaaagtcttccagttgagggatttgctttcaggcatgctgccattcatgtacctaggctcctttcactctcttgttccaccatcccattgggcctcactgtcttcaacaatcagacagcagaagtgaagcacccagttcagaaaggagcacacccacttattgaaagctttggtcctaaactggcacataccacttgtacttgcattcagtcaggtccagtagcttctacatatagcaataaagggggctgttaggggtggggaagacagacaatataatgactagtttggcacctactttccagctacaactttataatatgaatgaggagaccagagaacagtaagacatccctacaatatgagtaaaacaggtaacagcattcataagcaactccaagcttaaaaataccttaatatacaaaatattactagtgtttcacatagaaaatttatcctctgacaatgtttagactcatcacaaggaatatyttctttagtaaatatctgtttaaagactttggataatagtgtcttcttcaatcaaggataataccagcactgaaatgactattcaataagtgaattttgaagcattagattatttcattaatattagcaggaatcaagcaattacaaaaatttacagtgccaaactcaatccctattgtcattttatcatttattttattaaagacaagaataygtttataatcaaaaatacttggtattggatgtttccagattatcagtggcatactatttagtaaatagattagtttyttaaaaacctgtgagatgaagtgtggakaatggttggaaagaaaaagttataaaatgtaaataatacatctagaattatatcatagttgccttgcttcaaactccccgaaatctatactaaatgtatccttttcccagtctatcttctcttttaatcttatctatctgtttaaataatattcatcttcataaatatagctgggtctcatagaacaatcatagaatctctcatagaacaatcagatgtctacatgaagtgaaaatgtgtacaagtggtgaaataaatgaagtctctgttacggtgggcactgctatcattccattttgtatgggtcaacaaaaaagtttattttttcaaggaagaaatgtcccagtactgaaattttaaaaggcaaaaataagaatgggctatcttttcttgtctcccatcaccaccacacctttattagcatcttggggygattatacaaacttattccggacaaagagacctgagcagaaatcatcagagagattggcttgaattggcttgaagagtataattttactgtctcacagttctggaggcctctaagtccagcatcaaggtgtccacagacttgtttccttctgaaggctgtgagggaaggatatggtgcagacttgtagatggcaattttctccctgtgcctcttcacatcgtgttgcctctatgtgttctgtctctgtgtccaaattgtccctttttaataaggacatcagtcatattgggttagtccttaatttgtaaaaccctatctccaaatggtgacattctgaagcactgagagtactgtggtctcaatgtttgtgttcccccaaaattmatatgtcaaaatcctaaatccaaggtgatggtattaggaggtggggcctttggggtaatgattagatcatccccagcctccagaagtgtgagaaataaattttattgtttataagctatctagtttatgacattttgttataacggtccaaaagaactaaaacaggaaactccaatatctttttggggggcgacacaattcaaaccatgacagagctcaaacatgatgttgaggcaaggtaattaycttataatgaggcaaccagtataagaatgaaatccaacaacagaacaggatatggctgtgggcagaaaactagaatgaggatcactagtggcactagaaagtagtagactacctatgcttacttcaaaataagttttactaaaatatatttccaaaatgagaaatatacaaatgtcttgttaatagagtaaaagtttaatatttattttagaaattgttgaaatatttagaaaaaccaagattggtacttttacaggcatattttactttattttttataggtgtgtgtgtgtgctaatctgaaaatgaacgtatcttctcatatttgttttaaaaattgatttatattttcacatttacttaattacaatattgctttataaaagaagccattatttttaggtatttgcaaattttactttgattgctgaaaaacgtgattgagcaaacaaaaacaacaaaagacacactaacttcttcacgtacaaatggaacaaaaacactacagaaatattgtctcccagtggtttgtaaaggatttgatttgtgacrccrtatattagattataaccctctaaatgcttttgttcccgttcttattatttcagtgtcatgtgaatatttagytcagtccacataactataatagacaagacaacaccattgctcaatgatgtttctttaaagattttcagtttcatagcatgcttaatgtttgttgtttatgatttttatgtctctygtattgaaataactgacgttactgctttgcaatgaacacctctgcattgtacacattcaattcactccatcagttctaagacagaactgagtcttcatgtttgcatttcctgctgtgtgcaggcagttaaccacgttcttttcctatttacataagcaaatgattactattatgtaaacagtttaacttttaaatgctcagtatcttccattagatctattactagactcattttatatattcttaaaaacacygaaatttgaaagaagagatattcgattagggaatcattttaaggctaaccagcaaaatacaaagttttatataacaaaaaggaaacgcaaatcacttttcaataagaaaaacctgaagaatagtagcaatggaagtttccatctatacattagccattttaatgggattcatgttctcatagaacaaatagaaattgatgtaaatttgtgtaaatgtttacagacacacggctgaatagacagtaaagtatcaaatgtctcattgtttgagtttaaacaatatcttaaacaaagcagtaaaaagacatttagaatttttactttgcaaataatttaaaaattcctcttttytgtcatattgccctttggtttaaaagcaatggcattttcttattcctctcattctcttgacttaacttgggattgatataaaartaataagatgttgatttggaggagaaacagtcattccaaaggatggaatcacggtgaaaagtgctttaaagaaagcaaaaggttttctaaactttctattaacaagcattattaatgtgttgttaaattcttgatgtcaaaataatacctgagggtatttgataaatcaaatgattygtgagttctatgtatatttaatttcattcaaataatttgaaataatcatcacagtataaaaataattcaaataagatatttctcacaataattatataatcatactactatatggctggaaakaattttaggtatcatgcaaaacgccttccaacacaactcaggaatctctttgatgtccttttctatatgcggttacacagggtcccttaatagtccaaccaaagaggatttttatataatgtcagggctactgagttgttttctgaacaattctgtttgtgatacagatgtgcttaacaaactttgctcttcttaatttccactagatttgccttgctaggtcttccatttgtttaccaaataagtttaatctgtcacaaaaatggaaaatgccatcactccctatttgactttatgtccccgaagggaagaaccactgcttattcaccatcatattgtcatgaccaagcctataatagatgttcagttattatttgtggaaataaaatgaagaacagctctttacatattattctaaagttgtcatcatcataaccacatagctatatagtgtcataatttatgagaacaatttgttgtcattagctgcattctccaaaattctgctttgcagttaagttaaacctctcttcctttctccccttytcatttgaccccttaatcttatttgcactaatttggctttcctatccaagctattctaaatattttcagaagttcttactttattttttattagttcaaattaaattatctttgaaaaacattgtattcaatgtccatcgccatgctgactgatatagtaacttctaggcagtggctatcaaacacttggaatgctactgtttcagatcgagatgggttgcaagcataatgcataacatattatgcagacatataatcaaaaaggaatgtgtaatatatcattaataatttattgattacaaattgaaatgaaaatttttggacatattgagtaaacaaaaatacrtttcttaaaattaattttacttgtttcttttttacatttttaatgtggcatttagaaaaatttaaattatacacttcattttcatggataacacctgtctgaaggaattactgacaaaacattacattgagaaatagccatgattggcattcatgatttttgttgatctgctatgaagctgtaaagaagcatcagtgtctctcattatatattatttcaaagaattgtctttcctctgataatctaaattgcttacaaatagtgccaaggcctgttttaatctttttgccaaagactgggcttttcaattttctcactgatgttaagttcttatcaaagaactagacaggaaagctttcataagtctctttttctctgcatgccttcatttgccttcttgctgctgctttctgcatttgctttctgcatttgttaatcctgtcaatttgtttttctgaatgatattcatggctgtgttatatgaaaacattagtttttaaatataaaataaattttcattagcatgtctgaatagcatcctctgagtataataagtacartggaggctgggcatggtggcttacgcctgtaatcccatcactttgggaggctaaggcagatggatcacgagatcaggagatcgagaccatcctggccaacatggtgaaaccccgtccctaccaaaaatacaaaaattagctgggcatggtagcacacgcttgtaatcccagctacttgggagactgaggcaggagaaytgcttgaacctgggaggtggaggttgcagtgagccaagatggcgccactgcactccagcctgaagacagagcaagactctgtctcaaaaaaaaatattattaggacatgattattaagaagtaaaagattgccactctggaataaaatacacatccttcctattttaatatttccatttcaagagctatgtttaaggtcaatgttatatcagttactaatgcaagggcagtcagtgttgagtcaagatagtactaatttcccaatattctgtgaagattctattaaattggatttcaaatgacctcactatgtcaaacacttagagaaaataagcagaaattgtttaatgtatttactattaaacttccagctatgcttttaaaagaatcatcccctcagttctaaggtttttggctcccaagttaaacaacagtaatatagtattgctgccaaacggaattctagaaatgcaactttagaacaaactttctcttttagggaattatgatctgcaagaataactgtatccctaagacttcagtcagtcatgcaattattgcccatgacataattatacttttggctaattcgtggagttacaactcaacacaaagtactagawaaatatcttcaaaaaaatctaaatgagattcatggcgaaaacgtagcaatgtcatatttgttgttgcaggttgctagaatagttattaattggtccmcccttgataatgagtgcttggtaaagcgagataaaagacaaattcttcttatgatgacattttaggtcatagaatcaaccttcaacaagaatgagagttgaaacatatctgaagcttgaagtaaaggttgtttatacctggtgctaccaacagtagcccagttaaataaaatttctttagattttattttctgtcttatatttactatttccacaatttttttatttcattttttcattattgtgtgtcctgattatttttcattcccattactcttacttttttcatttgaatattcaaaagatttcactttcagtaagttgaggctaacctagacttcccttcacaactgctattttcagaatattttattcctagaaatcactacacaatttcacataatttgacataaccaaatattgctatagtactaaaatttatcagctaaaaaattagccctaaaatatttgccagaacccacataataaaaaatgtatatatatatatrtamacacacacacacatacataaatccactgggtttcttttcaactcattattctacaaagtgtgaaatgtacagatttggggttggataaggttatggaatgactttaataaataggtaarttttcaactttaaaaacaacagyaatagtagagaaaaatatttcattcattcctagaggacatttgtttctgttcctaatgaaaggaaagttttgaaaaatggagctattcttatgtaaataatcacagagaaattaaactttaaatatgggacctcacatgatggtattggctttaatatgggaatcgaatccttaaaaaactccatgtgtaatttcctcaagatcaccattttgtgcatcttctagaactgttcaaattttctagcattatatacaaaatataacatttatttatttttttcattttttagacaagctattgcattatcgtgatgccacttttgagacgttgaaatatgtaaaatgtaacaaaacgtttctaaacttttcctcgttaatttggtgtttgactttctaccacaccattgttttataaatgcagatttgcaaacgaaaaaaatacccattgtctgaaaagaaaaaatatccattgtgttctcagttctgtttctaactatgaacagaagggataaattattttattctgaaatccaaatgacaatcatttgggaaaactagagccttgccctaaggaaagtaggtcagctgcttgaaagaatattattggyaactgaggatttggcatcacttatacacttcctccattgaagacaacttactagaatggaatgttatcctctagtctttataagttttggaaatgtatttacagcccataatgcattattagatgtatttaaacaaagatgaattttctaatttcaaaagcctttggtttatatttcccatgaatttcaatttctccaaggatttttagaacgttttcctttgtagackgccctttttctaatatgtaaggtattcagrtcactgggcatggctttttttttttggtctagcctttgtattaaatgaagtttccagtagctactgtagttaatacaattttgcccattttgaatcaactattatgtaaaatagaagacacctacatgatttcattttattgacagaatgccttctctttgagagaaggtctatgaaactctaaattgggatgcataatcaggatagataggtaggtggatagatagatdatagatagatagatagatagatagatagatagatagataagatagatgatagataattatatgtttataaaatatatgaggaacaaatataatatgccatattttcatttttaatgaattctttcaagatacaatttacatttaccttgaaggtaaaaaccaattaaataattacaatgagcatattttacaaagattggaatttagatgagtcaatagagaaaaataatattactttagataaatcagtgagtgccaagcttataggcaatactcaaccaacatttgctaagtggaattaatgtaaaactgtgtcaggtgaaatattgaaagaggtcttttgtctgaaataatgttgacatagtactttcgaagggtcttattgttaattgcaaaccctcaaacaaaagttaattgtttggcttgttcaatgaagtctgactaagagaagattttagcaacacaaacatttcaacttcggctgtatctcgctttagtttcctccttctggaatatgtggttttataaaagaaatgcattttctacaatgaatatgtattacttttataaaaaatatttttaagattaggctaaatgattgattacatttaaagttaaacattagcaagaaaggcagcagttagaatgaaagtacaattatttcaggtcctctgagaaatgaatagggaaaataaataaataaaacctacatttacaagtaaatatttcctaatgcgcttccatgaatttaaaatgttaaaataattaaacttaaaaacgattatactgaaaatctatgttactaagcttgaatacaaattgaccctatattttttcaattgtatttttttggaatgtaaagtttgttgttcgcattgcacttatgcatgctgtgatggttaatactgagtgtcaacttgattggattgaaggatataaagcattgatcctgggtgtgtctgtgagggtgttgctaaaagagattaacatttgagacagtgagttggggaagtcagacccactcttaatctggtgggcacaatctaatcagctgccagcgaatagaaagcaggcagaaaaacgtgaaaaggagagactggcctagcctcccagcctacatctttctcacgtgctggatcagcttcctgccctcaggcatcagactccaagttcttcagttttgggccttggactgactctctgctcctcagcttgcagacagcctattgtgggactttgtgatcgtgtaagttaatagataagaaactcccatttwtgtatctcctattctgtccctttagagaaccctgactaatacagattttgataccaggagtggttctagatgaacagaatattaaggatggagttctttcattggtttttgggtttctggaggtggctgcttaatatgattagacagaaaaatgctaaggactctactaatagtatggaaaacactgatagtctttggcatgaactgtttagagagctatgcaaaataaatgcatttgatactcctgattcactgctcgtgagaggcaaggagtttagtgattttatgcataatacctttgaccatatatggagaatcaaggaacataatgaagctgatggtttgctcctaagttcagtggacaaagtgatgaaagaaaatgatgaactcagagcttctatctcctgtagagaaagagctgaaattgtgggaaaacagacacaagttcttagaatgagagtggctgaactgcaatgaaagactcatgcacaacctcgccaggtgtctactgttaaagtgtctagagggyattgactgaaaaagaatgggacccygaaacttggaatggggatgtgtgggaggaccctgatgaagctggggccactgagtttgtaaatcctgatgaaccttttttgtgaaaagaaacagcttccccatctctagtagtggcaacatcccctccccaacccacgctgccatcatcctttccacctttgtctgaggagataaaccctacgctgcctgagggaacagtgatggcctcccctgaggcagttgccaggcaaaatgttgattctcttcaggagccactcccaacacccctgttttcttctagacctataactacagtcccagcaggcccctagaggtgaggttgagagtgtgacccatgaggaggtgtgctacactcaaaaagaactgtttgatttctttaattatataaacagaaatctggagaacaggcatgagggtagatattaagggtatgggataatggtggaaggaacatagagttggataaggctgaattcatttatttgggcccaccaagtagggactctgctttcaatgttgcagcttggggagttaaaaaggttctaatagtttattggcttggttagctgaaatatggattaaaagatggcccactgtgagcaagctggaaatgcctgatctcccttgttttaatatagagggaggggwtccaaaagcttagggagattgggatggtggagtagatcagtcaatttagacctactcatcccagctcagagggtccaaaagatataaccttgaccaatgccttgcaaaatagagtagtgagggcagcacctgcatctttgaggagccctataatttctcttctctgtaggtcagatctaatggtgggcactgcagtcactcactacaaaatttaaatacagtgtgaataattggatcccgaggtggcaggggccaagtgtcagtactcaaccatcaaaggcaaggtgggtgtagctactgtaatggacagcagaggcaaagcagcaatcagaataatctgattcatatagagctctggcattkactaattaatcacagtgttcctagaagtgaaattgatatgaaacctactgcattcctacctaattgatacaagcagaaaacttctagatcgagtggacaaaacactaatttgaattacaaaaagagaatcccagccctcaatcaatttccagacttgagccagtttacagacccagaacggcctgagtgaaggggaggctggcctccttatggaaggaccccactacattaccaacaattaatgcagtgagtctttctcccaaggtggcctccagccttttaccaggataactgtgcactggggaaaggaaaatgatcagacattttggggactactggacactggctctgagctgacattgattccaggagacccaaaacatcattgtggtcctccaaacaaagtaagtgtttatagaggtcaggtaattaatggagttttagctcaggtccaacttacagtgggtgcagtgggtccctggtctcatcctgtggtcattttcccagtggccgaatgcataattggcatagacatacttagcagctggcagaacccccacattggctccatgactggtaggatgagggctattgtggtgggaaaggccaaattgaagccactagagccgcctctatctagaaaaatagtaagtcaaaaacaatgtcacattcctgaaggaattgtgaagattactgccaccatcaaggacttggaagatgcaggggtggtgattcccacaactctcctatttggcctgtgcagaagacagatggatcttggagaatgacagtggattatcgtaagcttaaccaagagatgactccaattacagctgccctaccagatgtggtttcattgcttgagcaaattaccacatctcctggtacttggtatgcagccattgacttggcaaatgcctttttctccgttcctgtccataaggcccaatagaagcaatttgccttcagctggcaaggccagcaatatacctttactgtcccacctcagtggtatatcaactctccacctttgtgtcataatcttattcagagagaccttgattgctttttgctttgatgaagatatcacactgatccattacattgatggcattttgctgactggatccagtaagcaagaagtagtagcaaacacactggacttattggtgagacatttgcatgccagaggatgggaaataaatccgactaaaactgaaggactttcaacctcagtaacatttctagggatccagtggtgtgggacctgttgagatattccttttaaggtgaaggagaagttgctgcatttggcccctcctacaactaagaaacaggcacaacacctagtgtgcctatctggattttggaggcaacacattcttcatttgggtgtgttactccagcccattgatggtgtgacccaagaggctgccagtttgagtggggtcagaaacaggagaatgctctgcaacaggtccaggctgctgtgcaagctgctctgacacttgggtcatatgacccagcatatccaatggtgcttgaggtgtcagtggaagatagggatgctgtttggagcctttggcaggcccctataggtgaaacacagtggaggcctctaggattttggagcaagaccctgccatcttctgcagataactactctcttttttgagagacagctcttggcctgttactgggctttggtggaaactgtatatttgactgtgggtcatcaagtcaccatgtgacctgaactgcctgtcgtgaactgggtgctttctgaccsatctagccataaagtgggtcatgcacaacagcattccatcatcaaatggaagtggtatatatattatcgggctcaaacaagtcctgaaggcacaagtatgttacatgaggaagtggttcaaatacccatggtctccactcctgccaccctgccttctttcccccagcccgcaccgatggcctcatggagagttccactcctcgccagaggacatatttccaagcaatcaaaayaccctttgtcccagactagtggcctaagctgcctcttccttcccctgcaaagaacttgtacaatgacgacttttccactcctcaccaggacacagtcccaggcatttagaacacttgtacagctggataggagcctgagacattcctcccttctcatgaagagatcttggtgcagcagcaaactctctgctccatgcccagacatagctccagggctttggtgcatctgccccctgagaataagagcttgagctgccatcccctttctgctaaaagaacgtcgtagagcagtactccctctgctccacactcagatagaactccaggcatttggcatgcccactctcacagattaggagtacaatctatccctcccttctcatgcagaccttgctgtggcagcagtttctctattccttctctggrtgtattacctggcatgaggcacacctgctcccctacagtaggcactcaagccamcccctccccttttttcctgcaaagaccttcttgcaaccacagtttatgtactctgcattcctggggcatgtttccaggcatttggtacatccacttgcccaaatttggagcctgagccacctctcccttcaggtgcagagatcttggtgcagtggagctttctgtgctgaaagcccagatatatctccaggaatttggagtacccactcttcttgatgttgtgtttaggccatactcccctacctgtgcagaaaacttggggcagtggaggttttccaactccatgcctaggcacacttstgggcatttggtggctgtgcactagaatcccccaacacagctggtgcttgtgcctgccattatgagacatgaggcaggcctgtccagtcgggccctgcctaccttggtcccccactctggagataagtagggagctcagaaccctgtgaattccacagttcaacccattgtcttgggtaacacagagcttcccatagtaaacaaggatcaagtattagtgtatacccatcccgattggctgcagccagttctaacactacagcaccacccactggcatggaggttgaaccccacaaaacaagaggaaatctgctgacacaaatgcatagctctggaaaatgtgataagcttcctgagcctactcacatgcctaacacattgctactacaacaaacatttgagaaagccaccatagaaaggcttcaataactaaggagtttttccagactctttaccactgaaaactcccagaaacaaagtaaaaggaccytatacaacatcatacattgtagacacctcctcaagaagggaaaaagtcctttccaaagtaaagcaaaatcaaaaaatatgaaggagagacagcttatccagatgtaaaagaacaagagaaaaaactccaaaagtataggaaaaaacagtgttacaacacccccaaagtgaagcagtaactctctagcaatggatctcaaacaaaatgaaatctttgaaataacagataaagaattcaaaatactgattttaaagaaaataattgagatccaagagaaaactaaaaccaacataaagaaatcagagaaaaaattcaggacatggaaaaggagacaggcatcgttaaaaaataaaaagaatttctagaagtaaaaaaaattttgaaatagttacaaaatacagctgaaaattttaacaataggctagaccaagtggaagaagaattatagagttagaagacaggtctttcaaattaacagtgagaaacaatttaaaaaaattttaaataaacaaagacttcaggatatatgagattatgtaaaacatccaaacctacaagttatacataattacataatgacagaggaagaagaaaacaaagaagaagaagaatgtatgaaaaacctatttgaggaaataatttaagaaaacttccctagtcttgggacagatttagacattcagataccagaagctcagagaattcctagagatacattgyaagaacttcaccaatgtatatagtcatcagactatccaaagtcaatgagaggggaaaaaaaacactctaagagcatcaagagaggggtctaatcattttgaaatcctattatactaacagcagaaatctcagcagaaaccctataatccagaagacattaagagcctatttttagcccacttaaagaaacaaaaaagccagccaggaattttgtgttctgccaaactaagcttcataaattaaggagaaatataacctttccccgacaaagaaacaccaagggaatttgtcaccactagaccagaccaccaacaartgtgcagtctacacatggaaatgaaagaatgacccacaccatcataaaagwtgacagaaatacaaagctcacagataacataaagcaactacacaatgaaaccacaaggcaactagctaacaacactatgataaacataaaatctcacctatcaacattatccttgaatataaatgacttgaatgctctactctaaaaacatagagtggaaactgtaaaaaayaaaacaaaagaagacaaaacaaagaaaacaaacaaaaattccagaactcaaccatctgctgcatgtaagaggctcacttactggctaaaggcagctgcagactcaaagtaaattagaagaaaaaagatatataaacagaaaacaaaagtgagcaggagtagccactcttatttcagattaaacaggctttaaaccaacaacagaaaaataagacaaagaagggtattatataatgataaagggttcaatacaacaagaaaatttaaatatcttaaatacatatgtacccaaccccagagcacccaggttcatgaagcaaatactactacatctaagaaaacactattgtattgataggaatacaataagggaggactttaacatcccaatgacatcactagacagaacattgaggcagaacatcaacaaagaaactatggattaaactgtactatagaccaaatggacctaatagacatttaaataacattctatccaacaaccacagaatatacattcttcccacctccacaaggaacattctcaaaaatcaaccatatatttgggccataaagcaagtaccaataaattttcaaaaaatctaaatcatattaagtatcttcctcraccacagtttaataaaattagaaattaatactaagaggaagtttcaaaactacacaagtrcaaggaaggttgctcctgaatgacttttctgcaaacaatgaagttaagacagaaataaaaaaattccttgaagtgaatgaaaatagagacaacataccaaaacttctgagatacaccaaaagaagtactaagagtaaagtttatrgcattaaatgcccacatcaaaaagatagaaagatcccaaattaacaacctaatgttgatccacattataaactatagaaactataaaaacaagaataatccaaacccaaaactatcagaagaaataataaagagcagaactaaatgaggttgagactaataaattgatacaatggattaataaaacaaaaaggtgtttttatgaaaagataagaaaaattgacatatggttagctagcatagccaagaaaaaatgagagaagattcaaataagtaaaatcagaaataaggaaggggacattacaactgataccacagaaatgcaaaggatttccagactgttatgaacacctctatgcacacaaaatagaaagcctagaggaaatagataaattcctggaaacatgaccctccacaattgaaccaggaagaaacataaatcctgaactgaccaataatgtgtaattaaatagaataagaaataaaaaatctttcaacaacaacaacaacaacagcccaggaccagacagattcacagctgcattttaccagatgttcaaagaagagttggtaccaatcttactgaaattattcaaaaaaaaaaaaaaaaaaaaagactaaggaggagcrattactccctaactcattccacaaaatcagtatcacccttataaccaaaatcaggcaagggcaaaagaacaacaacaaaaataccacaggccaatattctagatgaatatcaatgcaaaaatcctcaataaaattctagcaaactgaatgcaacagcatatcaaaaagataattcttcacaatcaagtgagttttattccagcaatgcaagaatggttcaacatccagaaatcaatcaatgtgattcatcacataaacaaaactaaaaacaaaaaccatatgaccacctcaatagaaacagaaaaagcatttaataaaattcagcattscttcatgataaaaatcatcaacaaactaggcattgaagaaacatacctcaaaatagtaagagccatctatgacaaatccacagccaacattatatagaataggggaaagctgaaagcattccccttaagaaccagaacaagacaaggatgtctcctctcaccactgctattcaacacagtactgcagttattagagcaatcaggtaagagacaaaaataaaaagcatccaaattggacaggaacaagtcaaattatctctgttcactgaagacataatcatacaagcaaaaaacyctaaagatatatccaaaggactcctagacttaaataaaatcagtcaagtttcaggacacaaaatcaacgtaaaatcagttgcatttctatacaccaataacattcaagctgaaaaccaaatcaagaactcaattccatttacaacagccacaaaacaacaacaacctagaaatacatttaaccaaggaggtgaaaaatctctaaggaagaactataaaacaatgatgaaataaatcatagatgacacaataaaaaatattccattctcatggatttgaagaatcaatgtcattaaaatggtcatactacccaaaggattccacagattcaatgcaatctctatcaaattaccaacatcatccttcatgaaattgggggaaaaaatctaaatttcatatgtaaccaaaaagacccccaatagccaaaacaatcctaagcaaaaaraacaaatctgaaggcatctagatttgcctgactttactgctggacttcaaattttacctcaaggctacagtaactaaaagagcatgatactggtataaaataggtacacagatcaatagaacagaatagataacccaatataaagccacatatctacaacccactgatctttgacaaaattgacaaaaakaaatgatagagaaagagcatcctgttcaataaatggtactggaatagctggctagtcatatgcagaagaatgaaactggaccacctatctctcatcacatacaaaaattaattcaatatggacatattagtctgttttcatgctgctaatacagaaatacccgagaccgggtaatttataaagaaaagagatttaacggactaatttttccacatggctgaggaggcctcacartcatgatggaagacgaaggaagagcaaagagacatctcacatggcagcaggcaagagagagcatgtgcagggaaactccctctataaaaccatcagatcccgtgagacttactatcatgagaatggcgcaggaaagacctaccctcatgattcaattacctcccaccrggtccttcccaagacacgtggggattataggagatacaattcaagatgagatttgagtgaggacatagccaaactatatcaatggtttaaagacataaatttaatacctgaacctataaaaatactagaaaaaaattagaaaatcttttctggacattggcttaggcaaagaatttatgatgaagaccycaaaaacaaatgcaacaaaaacaaaaatagacaaatgagacttaattaaactaaaaagcttctatatagcagaataaataatcagcagagtaaacaggcaacctacagaatgggagaaaatatttgcaaattatgcctctgacagaggactaataatcagaatctatgaggaactcaattcaaaaaaaacaagcaaacagtcccattaaaagctgggtaaaggacatgagcaacacctctcaaaggaagaaatacaagtggccaacaaacacatgaaaaaatgctcaatatcactgatcatcagagaaatgaaattaaaaccatattgcaatatcatcttacaccagtcagaatggctattactaaaaagtcaaaaaacaggtgttggtgtgtatgcagagaaaagggaacattgatgtgtatgcagagaaaagggaacttttatrtattgttggtagaaatataaattagttcaacttctagggaaaacagtttcgacatttctcaaacaactaaaagtagaactaccatttggcccaaaaatcccactactgggtagtgagattttcttacccagaagaaaagaaatcattatactgaaaagacacctgtactaatttgtacattgcagcactattcacaataacaaagtcatggaaccaaactaagtgtccattaatgtttgactggaattttaaaaatgtgatatatgtacactatggaatgctttgcagtcataaaaaagaatgtaatcatgttttttgcagcaacatagttggaatagaggccaatatcctaagtgaactaacttagaaactaacttagaaatggaaaaccaaatatcatatgcttttacttataagtgggagctaaataatgcatacacatggacataaagatagaactaatagacaatagggactccaaaagacggaagggtggaaaagaggcgagtgttgaaaaattacctatcaggtacaatgttcaatattttcattgttggtacacttagaagctcaaacaccacaagtaagcactatatgtaacatacaagcacatataaccccaattctaaataaaatttaaaaataaaaataatttcataatattggtcacttgtacctaaaaaattaatattataacatagcacttaattccagtattaattgcataggctacttaaatttaaatgtgtgatatgtgatcgtttccatattttaacctctaaaatacacaatgtaagaagctaaaatgttcgttccaaatatatagtccagagaaattttatttctagagatatgcattgcaattattcattatttttattagagattataaagtgagttattacaaattgttaagaaacatttctagcactctgccttacaaaactagaaattcacaaacatgcattataataatttaaagtatttattatgaagtcaaagatgcacacgacgaacattttaagaattactcttggaatgtaacagcaatgcagaccaatatgttcttatgtagaccatgaagaaatgtatataaactgatgtattaaataagtgtgaaaaacgaatattccataatacatagtaattgttatttacgataaacatatttttaaatatatatgtgtgttgtagttaattacctagtaaaattagtataaaaagatagaaaattacctgacttggttggaacttttcaagtgccagatacagtcctggatttttaagatgcgtgaaaaagtacctgaaagccctcattgataaaaagaggagacrgtgcatatcagcttacatgtttgctcctctgtttaaggaacactggctggtcagagagttttatatagaagggagccctctcagcagagatgctgcccctygtgatctgacttccctctaaaagcaaccacttggaccaggattcagcattaactcaagagcagtcaattcacaggtcaatcgagaatcttggatatggatagaagaaaagagatagcagtcaggccatgtctggtgaacgtcactgaaaataacaacaaaatagcagaggaaaacttgttagcatcatggtagatttgaggtacagaaaaagccaaggacagttcatggcattgaatataatagccttgcctcacggagcttagagtggggacggatagcattaggagatatacctaatgttaaatgacgagttaatgggtgcagcacaccaacatggcacatgtatacatatgtaactaacctgcacgttgtgcacatgtaccctaaaacttaaagtataattaaaaaaaaggaaaacaatcattaaacaaatactcatgaactacaaatattacaaccaatagtgctcgacagtatgaagggaaattgtaaattttatgagaaaaatggtaaaccccacattagactgggacttcaaggaatgtctccagtgaaaataatttgcttctggacccttctaattcaggacattggctttctcctgttagcttatctgtgcagagagcagtggacaattccagtcctattgttccacaccccccacccttaccatcaccaccctgcgttttttgttgtttttgttttactggacaacacttgcaattttcaccaatcattctaagtctcaaagtgagataaagatgtgctatacaatggagctaagatgcaaattgttttatctaatggagtaaggacttttcatccttttctgcacacaaatatcgctgaatctcctgggtttagaagtatgaattaatacracattgagaaagtaatgttcctaaaagctaaggaacgggctgaattatttttctgttgacataaagtcttcaaaagttccaagtctcgaactaccgaaatgatacaattttgagtgtttgaattgtttttttttttgaggagtggacctttatgacaaatactgagattaggagagttggatttgtatagtgtaccaaaaacactcctaaaaccacatttattcaaacataatgtaatacatgttttataaactactttttacagatagatttagtttttgttacaccctttggggagttaactgagaaagtgttcctgtaacactctcaattgtttggatgcattctttagaaattaatatccttattggcgtatgtgttatattacctcatatgcttctttgcctaaaacttgctgacattttagtggaaaaaaatagaaaggagtagcctatcagctatgctgcactaaactgcttagtattatgcagctaggcaagcagggcccttacaacatgccttaacagtgaatttcatgccaaagaacaagatgcttgcaggattttttaaaagtttggggttatggggagagtagtaaaaaaatcaatgtttttgtcatattgcaagcatttgatgaaagttagaaatataaagatatgaggtgaaaggattcttgatctctctctgtcagtgaaatcyatgccttcccactttgtttttttctgacagcaaatattttcacactacacattacagagctggagtagaagataactaactctttatatctgcaaattcctaaaacatggacaaagtccagtcctcttttgtgagacttttgttatcacgaaaggattttaacttgtttatattcttcttgcarcaaaagtcatttttgtagattttttctcctctcctcttgagaaatgtgcacagttggaacatcttgcatgatagtgtgtatgtattaatagatatatttccctttaaatttgacatatgttgatatcttgctcccttggcatcaaataaaaataaaaacagattttaacttcaactttaatgtacttggcaaaaaactggaaaacaactgaatttaattaagcacaaatgcagtgattcgaagacattttagacatggagcatgaataaatccagcgattttgtaattttcagctcatgtgaacaatagctattataattcccatttaatagctgtaaacttagggatataaataattcaaattactttcttcaaacacagtctgtagaaaggagtaaaattgaaatgtagcagttgggattttagcaacgtctgatgtttgcttgatgtttatgaaagaagagaacaatacagggatcagtaatctcacagaggaaattaaggagaaaatagtaattaaaaaaaaacaatagtgtttctccattttacagtttacaaaatatttaacaagcaatgtatctacttgtaaataggaattaaaatttctgctattcactgactcagatactaaatagggtagttgttaaacatccccagagagaaacactaagttgtcagaaaaataaagacagatgtagagggaggcagtaatggtttttgatggtgcttacacactgagggcttcctgatatggaatgaaggacaacttacattgtggatggagtcctgggacctctcttaagacccctgggcaggccagtggtattttgtaactgtctcttatggttttatgaaatattttgaaattttgaaagttagctggtagctggaaattggccattgtaagagtatttacaccatggaaattggctacaaatccggatattttttttcgcagacatccaatttgtcagcacacaactacttgcacctgaagagtagcctgggcacttttatgtataatccagtgctaagctactgcagtctacttttgggggtgaaatgaaactttccagcaacggttagtgagaagtcccagttgggttgtcagtcactgtttaagaattctccataatcatcagcagtgaggcttttggaaaaaacatatttcttttatttwtttttttattttttcttgagatggagtctcgctttgttgcccaggctagagtacagtggcacaatcttggctcattgtaacctcctcctcccgggttcaagtggttcttctgccttagtctcccgagtagctgggactacaggcacgtgccaccatgccctgctaattgttgtatttagtagagatgggatttcaccatattggccaaactgstctcgaactcctgacctcattatccacacacctcggcctccaaaagtgctgggattacaggtgtcagccaccgcgcctggccggaagaagcatatttcakgcagaccatatgggttgttttcctacttcctgttttagatcttggttacattactacaaaacataatggcatatgaatatctgtcyaatgccagtatcagacacatatgctggtcacaaggctaaataatttacccctacatgaatttatcttgtcttgtttctgtgcttgttttatgatgggtattattggctatctttgttttaaagttatcttatctagttgtgaatgtaatcattkcaagacaaaagacatgtattttatgcagtgttgaagcagaaataataaagtaagttatatagcttggatttctttttaytaagaagaaatcttctatgtgtcactccagatgttaacctttggtggtgaagagctgccaccaaaagacaatgaatacttttttcctcaccaagatagaaaatgatccataagtcagttaattaatcaaatcatcagttaaataacagttatatactgagtttgagaccatttttaaaagaacattaattgcttcagcttgactttcatttcttcatagaatgcaataaaggcaatatacatcatgtttcacccatccagttatagcttcttggggctgagaaaaagaggggtcaaccattagaaatgtcygcaatcaatggattttcaaaccagtcttcttcccagaaatttagaattatttggtgataactatagaagacttgccatgagagattttttttttacaaattaaataaatatatccagagaagaatggggaaaaaaattgtatatcttactgttgcagaatcaaaaatcccaatattttggagaacacaagtgaaatctccccacttcttaaataactgttatttcctatagcatggtccactgatgatggtgcttggtgcagcaatcaggatgatctgggctccaacaggagtcaattgacctatcagatagacaatttattgctggacacggaaaggcctcctctaacattcttacgggactggcttattcctgaagctaactccactctctatcacagctttagaaagctttgccaaacacggcaaagtctatcagaatgagggagagatttatttccctgccactcgttatgagagcatgagcatcatttccagccatttcgtggaaccatcctttatggtagcctgacagtggctactgcttgctactaaaaaattcgttactgaggcaaatatgacctttgtgtgtgcctttaacttatagggatttaccacacgggcaggcagtcaacaaaatcaaaccatttccaacagtgtctacgtaagtagcattatggcgatacagcttacttaacttgctattaaattcaatgacaaatttcagagtgtgaggtttttctttctgttttatgctgtttgcaaattgatacctcagaaatgttattcatgtttatagatggtagatagatgtgtgttatcatttaaccatttcccatattagtgaggatagatgaggatatgctacaatcccaaaatctcagcagcagaacacagcacaatgtatttctcatgtctgtaaagtccaccatgcgtttggttgacttgatccaccaggcagtgactcagtataccaggcagcttcatccttttcacattgtatcctcaacagtggcctccacattctgtgtcttggaggaagtggtagataggagaactgtatatgggattactgttcctgcagcccagaagtgagacacatcacttcctttcatttttccttggccataactaatcctatgggcctgttaggaggtgtgattttctatatttccatagaagaaaaaacaatcagacatggctgagcactattattttctaccactccactcaataaatgtttctttactcctagtagtgtccatatctactcattgtgctttatagatatatgctttttttcatttagaagttgtcttagtccattcaggttgctgtaccaaaatatcatagactaaatggcttacaagcactggaaatttttttctcacagttctagaggccggaagtccaagataaagtcctggaagatttgatatctggtgagggcccacttcctagtacacaaccctcttcacctcacataattctaacctgttgattgtctttgaggttttattgtttacccataaactggagtagatcccaaatacttcttttttcactaaaaattaaaacggatctgtttccaatttctgcaaactgaaattggaccacttggtataaacctcaaaaaaattaccatarcaaatcatatatgggcaactttcatgcctgctactgtgtgggcttctcagagaggccactataacaccccgtgtcataaccagaaacactcaaactgcaaaccgggaaaatccatcacattgcaactgctattctcactccatcatttttagatttgaatctttaagtttaaatctagaaactgcaactaactgccatccagactaaaaaaactaatcttataatttgttccaactattaacctttttttttttatgtttctaatagtgccttaagttatcttcaagtaatacaatctgaagtgaacaatttagcttcagtataggagagttcttaataccctaattgctcaaaaaggagattatgctcttactgggagaaaacgctgtttctatgttaatatgttaggcattgttacccaaaacttaaaataacttaagatcagatgcaaatcttttccccaaaaggcaaggcttctttctttctctctctttttttttccttttttttttcttttttcctttttctttctttctttcttttttttttttttttttttttgagacagagtctcgctctgttgcccaggctggagtgcagtggtgagatctcggctcacgccattctcctgcctcagcctcccgagtagctgggactacaggcgcccgccaccacgcccggctaattttttgtatttttagtagagacagggtttcaccgagttagccaggatggtctcgatctcctgaccttgtgatccttctgcctcggcctcccgaagtgctgtgattacaggcatcagccactgcacccggccaggcgaggcttctttcatgaatgtatttaactagttaaatcttggctcctgggaatctctgctctagggaatttttcagtccttgactagtactctcttcataatcattgtattaatctctctggagagttctatcttctcaagtgtgttaaatgccctttggaagccactcacacatcaaatggcatctatcaggattatgtagttcagagaactcaatgcccttaccacccatgtctgtgatggtcatgcatgcctcagtgacagtgacttcctgactatccctccagtgactacatcaactgtggtacctccgagtaatgctataccatttggccacatgctcagctttctgagaggctgaccaaaatgtgggtagtgttaaaataaaatggagaccaagcttgagaatcccctgatcagacaaaatcagttaggccacctgagtgaaacgtagcttaggtgatttcttgtaaatgcctctgacagtcataaatgaaacacgttggcttctaaaaatggtataatatgatcaccttccactaactccctgccatcttgaaacctcagtagcaatagccaattattgtagagattaagtgacttcttcatttttgttttataccccagcctataataccatatgtctgaacttcctttgaccacttttaggttgagcattcacagttcatcaactgtcaatttgtatgtaccataaacttaaagttttcaatctgatctgattttgctgttgacaatatattaataattttattcaaaacaaaaagaaaattttcaaaatgcaatttataaggtatgttattcttaaaccttatctttttatcttgactccatcataccccaaaccagcgatacaagcttacatgtagatcacttttataaggctgtatttcaatccctagtttaaaaagttacatgggaaagtacttaggtatgattcatttgaaaaatcttgctttcctcatttaaaaatctactaaaaatatgatagtttcctacaacttctggatgaagaatgtattgagctgctaaaactctcttggcgtgttcagcttcttgttctctacactgcttgatttatgaaagccagtgcttgaagccaaattgtttctaagacaaaggttggtgttttaaaaaatggactgtgaggtagtatcttgcatcactgttatggactgttaaattcaacgtttaccagagcttgattttgagatattcctctctctaaatacattgttattttatgaagttataggtagctatatttttaaacaacaacaacaaaggtggtgggtaggtattatggaacttaaagagcattcttaaaggtgcccaaaattggaagggacctttagactatatagtttttaatgcaacatatgtcaagggccttactcacttgcatgtaaattaaatatttattgaatttgcaagctctttgaggttgctgtgtcaaataccaaggagatagggtcatagaaatacttactggtacaaaaaaactgatttaattattccactaaagttggaattgtgaaattctgcatatataaatcaaggaaataatcaaacccaatccaataaacacacacacacagacatacgcactgaattataaaggtctgtgagtaagagacagaggagacacatcaaagaatatgggggtgcaggcatggtggctcatccctataatcctagcactgtgggaggccaaggcgagtggatcacttgaggtaaagagttcaagaccagcctggctaatgtggcaaaactccttctctactaaaaatacaaaaattaggtgggtgtggtggtgcacacctgtagtcccagctactcagaggctgaggcatgagaatcacttaaactcagggggctgaggctgcagtgagctgagatagtgccactgcactccagcctgggtgacagagcgagactctgactcaaaaaaaataaaaataaaaaataagaataagaggtggggagaagacgaaataagagagtatatcatggtgaaaggagactgtcaaacatctacaagtttggaaaaggtctcttgtcctttccttgggtaggaaatataaatctctttctgacaaagaatgtgattaatttgagggggattatgtgcccaataaccaaaaacattggctatttcctccactcattgtattttgttcttttgttttatgtatattccctgtgaagatgggaaccatgtgtgaaacccaacctcaacgaaacttagtaagcattagaagctacaggatttaacatttctgttacagtcataattgtaaacgaatctttcatttcatggtgacttataggtctctgattatgttttgaaatacggtggtgcttcagttgctgtatcttagaataatttactagaaagtgccctgtagtcctttcaaccactgggtggatacaccaaaatgtggaaacagtgtgggtaaagtaacgatgccacccagaaaagtaaaacaagccaagtgccagattttggttaaagtatataagacacagacaggcttctggccaaagatacagagaagcaggaataaaagaaaaacaaatgtaaataaagaatgaccagtatagaattcaaaaataaaaaagtaaaacgagagaaaatgtgccacacccagagcccttctggaagttttcaaacccagaattctactgagggaaatggaaatagttataacatatttctaaaccccgcttgtcatagttgattgggctaggagtgagctgagcatctaatccaaacctaacaaactctagggtgaccagaattctatggagtacattgacacaaaagctagttcttttgttaaatgagaatgattaacttgtatcaatcaaatttttcacaaacgtttttgagtgtcagatacccaaattcccaccagttcatgaaataagccaatacaaattaaaaaggaatagaaatgatacataagcagaaacaatgactaaatattaggaagtacacaaagatatgcagaatataatgacagttcctttggaaatgtcagacactgagattgaaagaacatggacattatatttgcagactgggaaagatcacatgaccacctcttcctcctgagatgtaacaagctcataggtctatgtcttacctcaggctctatggaaaacagaccctgaggtttagatttgctttcaggcagttttctagggagtgctcttcagaacacctcgttcagaagagtcacacatttgggattagacagagggaggactttaaatttgatatactcttagcaatctcaaaagatctctggcactgagcaaacccttcagagggcagtctttcacactcctttatcaccagttgtactccagtttacagtcaagatgggatcgccctaatacaaccaaggttctccctcttataactaaaaaccattggatataacacaacaaacaagcatttaaaaagtctgaaatgttaacaaagaaagtaggctgactagtgaccttgagacttggggaacatggtggtgagttcccaggtttttttttttttttaattgcccacttataactgccaatagaacaccaaaaaaaaaaaaaaaaaaaacctggaagaaaaaccaattcctattagccaaagtactaggaaaaagtggccaggtggccaaacaacagaacaccattccagcaattgctgccttactccagccaaacaccaataaaaaacatcaacataccctctccccaccctacagtttcggtgaggctgagtgaggagctgatcttctgtctcaccaagctatcttgcagaggcagggagtagagctccaattttcccaatggaaaaactatggtgtcagcagcactgagcaaacaactaatcttccattcccagtcatgcagaagcagatggagcttctatttcacagctggatattgttaacagtgcagagaaaggagtttattatgcaaacctcttctagtggaagtagatgacaacaatctaattcacctactgggttagtataacagggaccaa

SEQ ID NO: 94005 - DNA, 38913 bp, Homo sapiens
gtgccctcccctccccacccattctgccttcccagcccagcctgtgctgctttctctctcctctgcttttcttagcttgtgttctaccaccaggcactatgtgtgagtcctgggtcccagtaagattctagggctagcgttgtgccttttatctctttgtgcccgcatggcatctggcaccatgcagagccttgttcctttgctcagctcttgattaagcatatggattacagacaaaggcccagctgggmcctacccagcagaagcttccaggctgggaggcaagacagatgagcagtgattgggtgccaaggaattcagagggctgcagctgtgagcaaaggcttgggctccaaaagccacacagtcagcccaactaaacattggttgtctgaagtcacttggggcatcaatcacaggtgcccaaaacgtcagtcagcaggaactttacaaatcatctgctccaaccctttatcatttaagagcacttcatcatagaattgttagaaaatactggtaaacatgaaaaaattttaatatggaatattacccaaagataaccactggtaattttcatatatatttcttttctactgatttttatagatcatccgatttcacaaaagtggagtcattctatatataactatttgtaacctggaatcacacttgttacttgacttgttacttgctgtttttctcctccaaacactatgctgtgaaagcactatgctgtggaaataacatgatgtagaaacaatgcactgtagaaataatataatgtggaaacaatatgatgtggaaactacctttcaacaccaataaatattctacttaatactttaatatctctatgtttataaagtatttcattgagtgttgaaccaagatgtatttattctttattgttacccctctaagtagtttacaagtttttttttgctattgtaagcaaggctgaaatgaatatctttgtgtatctatattcttttcttcatttacattaccagaagtgaaattactccatcaaatgcactacacgagcatttggaaaatacatttctggattgccttctacaaaaaagtgccaattcccacactcaatggcatcgtgtggtagggtgtgtttcttcatacatacataaactcttggtattttcattgtttttcatttgtactagtctgttcatcagtaaattctatcatgaaggggtggcctgcctctccacatctgtgggtatttctagtcgggtgggacgagagactgagaaaagaattaagacacagagacaaagtatagagaaacaacagtgggcccaggggaccagcactcagcataccaaggacctgcaccggcaccggtctctgagttccctcagtttttattgattattatcttcattatttcagcaaaaaggaatgtagtaggagggcagggtgataataaggagaaggtcagcaacaaacatgtgagcaatagaatccatgtcataattaagtcaagggaaggtactatgactggacatgcacataagccagatttatgtttctctccacccaaacatctcagtggagtaaagaataacaaggcagcattgctgcaaacatgtctcacctcccaccatagggcggtttttctctcatctcagaattgaacaaatgtacaatcgggttttataccgagacattcagttcccaggagcaggcaggagacagtggccttcctctatctcaactgcaagaggctttcctcttttactaatccacctcagcacagaccctttacgggtgtcgggctgggggacagtcaggtctttctcatcccacgaggccatatttcagactatcacatggggagaaaccttggacgatacccagctttcaagggcagaagtccctgcggctttccgcagtgcactgtgcccctggtttattgagactagagaatggcgatgacttttaccaagtatactgcttgtaaacattttgttaacaaggcacgtcctgcacaaccctagatcccttaaaccttgatttcatacaacacatgtttttgtgagctccaggttgggtcaaagtagctggggcaaagtggctggggcaaagctacaaattaacaacatctcagcaaagcaattgtctaaagtacaggtcttttccaaaatggagtctcttatgtcctccctttctacatagacacagtaacagtctgatctctctttcttttccctacatatcaccctaaaaaaaaaaccaggaagccaaagaatttggacctgatgtgatgggctgtggcaaaccactaaaggtgcttgagtgatgtgagcagagttcttacttgggtcgcacaaagatattatagaacaaaaatgaaaattacaaccaggcacagtggatcacgcctgtaatcccagcactttgggaggccgaggcaggtgaattgcctgagctcaggagttcaagaccagcctgggcaacatggtgaaaccccatctctactaaagtacaaaaaattagcctggtgtggctgtgtgtgcctgtagtgccaggtacttgggagtctgaggcaggagaattgcttgaacccgggaggcagaggttgcagtgagctgagatcatgccactgcactccagcctgggcgacagagcaagactgtctcaaaaaaaaaaaaaaattacttccatggtcacataaataaaattctctctgatggcctaggcctgaactacatcaaaatgtggttgacaagaaaataaaaattaatggcaggggagagatatagttgtgtttgttgttattggtcatgggaggagaaggggttggggaaggcccatcccatccctgccaattctcattgttataataagaaactctatggaagaacattccatgctcacgggtaggaagaatcaatatcatgaaaatggccatactgcccaaggtaatttatagaatcaataccatctccatcaagctaccaaagactttcttcacagaattggaaaaaactactttaaagttcatatggaaccaaaaaagagcctgcattgccaagtcaatcctaagccaaaagaacaaagctggaggcatcatgctacctgacttcaaactatactacaaggctatagtaaccaaaacagcatggtactggtaccaaaacagagatatagatcaatggaacaaaacagagccctcagaaataatgccgcatatctacaactatctgatctttgacaaacctgacaaaaacaagaaatggagaaaggattccctatttaataaatggtgctgggaaaactggctagccatatgtagaaagctgaaactggatcccttccttataccttatacaaaaattaattcaagatggattaaagacttaaatgttagacctaaaaccataaaaaccctagaagaaaacctaggcaattccattcaggacataggcatgggcaaggacttcatgtctaaaacaccaaaagcaatggcaacaaaagccaaaattgacaaatgggatctaattaaactaaagagcttctgcacagcaaaagaaaccaccatcagagtgaacaggcaacctacagaatgggagaaaatttttgcaacctactcatctgacaaagggctaatatccagaatctacaatgaactcaaacaaattcacaagaaaaaaacaaacaaccccatcaaaaagtgggcaaaggatatgaacagacacttctcaaaagaagacatttatgcagccaaaagacacatgaaaaaatgctcatcatcaccggccatcagagaaatgcaaatcaaaaccacaatgagataccatctcacagcagttagaatggtgatcattaaaaagtcaggaaacaataggtgctggagaggatgtggagaaataggaacacttttacactgttggtgggactgtaaactagttcagccattgtggaagtcagtgtggccgttcctcagggatctagaactagaaatactatttgacccagccatcccattactgggtatatacccaaaggattataaatcatgctgctataaagacacatgcacatgtatgtttattgaggcactattcacaatagcaaagacttggaaccaaatgtccaacaatgatagactggatttagaaaatgtggcacatagacaccatggaatactatgcagccataaaaaatgatgagttcatgtcctttgtagggacatggatgaagctggaaaccatcattctcagcaaactatcgcaaggacaaaaaaccaaacaccacatgttctcactcataggtgggaattgaacaatgagaacacatggacacaggaaggggaacatcacactctggggactgttgtggggtggggggaggggggagggatagcattgggtgatatacctaatgctgaatgacgagttaatgggtgccgcacaccaacatggcacatgtatacacatgtaacaaacctgcacattgtacacatgtaccctaaaacttgaagaagaagaaaagaagaagaagaggaagaggaagaataggaagaagaagaagatgaaaagaagaagaaagaagaggaagaggaagaagaagaaatgaagaaagaagaagaagaagaagagaaggagaaggagaagaagaagaagactctaaacaggtcagaacaaagtagcaattctatgggctgctccagggtggatgagaaaaagagaagaaaggcaagagaaagagataaaaggaggaagaaagttgtaaaggaagaaagaagttaagttcagaaggtaggagggaaggaaaggagggatggggaaagaggcgagagatgggggaaagagatgagagagagagaggacagaaaggaggaaaaaaggaataaaggagggaaagaaggaaaaaagggagaaaagagccttccttccctccatcctcagggagagaagaggacaaacccgtgttgttaaggaggagaaggctcagctagaatggaaatgctttgaaagttctaggtaacttcatccatgcattcactaagaggtattggaaattaaattctttccccttcaaaactcgtcccactgaaaaataagttgcattggaagacaggtatatttgaaggcaggaatagaatcctatgcgctaggaggagggcactcttctctacttacaggatcatgccctgagaaatcttttcttaaaaaaatttagactcaggaggtgcatgtgcaggtttgttgcatgtatagatggcacaatggtgaggcttgagcttctagtgtactcatcacccaaacagtgaccatagtaccaaataggtaattttgcaaacttcactcccctccagcctccccaatgtctattatttccatctttatgtccatatgtacccactgtttaactcccacttataagtgaaaacaggcagtatttgattttctgtttctgagttatttcccataggataatggccttcagctccatccatgttgctgcaaaagacaggatttcattcttttccatggctgagtaatattccatgttgtatgtataccacattgtctttatccaatcatccactgatggacccttaggttgattccatcactttgctattgtgaatagagtgctaccataaacacatgaatgcaggtgtcttttttatataatgatttcttttcttttgggtagacacccagtagtgggatttatgcccagagaaatctctgccatcctgggcagggctggtttcacgttacatgctgagttctctcaggaggttcttccctaggctcatgcctgacattatgttgaaacctaccagtactgccatgtcagtaaacagtaaatatttctgtgccagttgagaaacagtagctccccctaagcccaggcatcctagcctctcaagatctagccacttgagggtgctgtctggcaacagtggcctcccatagccaatgtccatgctgactaatattcatattttaaacatcaccctgcctaggacggactcagagggccttaccccgccctctggaasgttagtgccaaaggagaagaggacaaatggagctttgaaaggatgactcaactctccaagaaggccgccagcatcctctcagacacctgtgcccttagccatggagaccggctgatgataatcttgcccccaacacctgaagcctactggatctgcctggcctgtgtgcgcttgggtgaggcatgggagacggaccccaggggttggaggcttatgtgaatcccagcctcagttattcacagaatggagatgttagagggatctctatctgatgcctgaattcttcccacagtgtgggggatctttaaacaggcctagatttgaacccagctccaccacttaccacctctgtaaattatgcctctctgaatctcagtttccttgtctattaaatatggacagtaatagtccatatttatagaactgttacggtccagtcttacagaactgttgtgaagagtaaataatccacagagcgcttagctcataggctgtttatcacctcaaggaactgtagacctctgtcctaacatagtcatcatcaaaacaacagacagagcatgcacatcttgccctctctgggcctcagtttccccatctataaaaaagagaatgtaggggtactgggtgcagtggctcacacctgtaattccaacacttygggaggccaaggcaggcagattgtctgagcttagaagtttgagaccagcctgggaaacatgatgaaaccccaactccactaaaaaaaaacacaaagcagaaaaaaaaaattagctgcatgtggtggcacacacctgtagtccagctattcaggaggctgagggacaagaattgtttaaacctggaaggcggaggttgcagtgtgctgagattgtgccactgcactccagcctgggtgacagagcaaggctctgtctcaaaaaaaaaaaaaaaaaaagacagagaaggtaggaatatctctaaagcgtcctctacctcagtctgtgacatgttaggaactaggctgcacagcaggagatgcgcagagggcaagtgagtgaagcttcatctgtatttacagccactccccattgcttgcattaccacctgagctctgcctcctgtcagatcagaggtggcattagattctcataggagcgcaaatcctattgtgaactgtgcatgcraggaatctgggttgtgcaccccacatgagaatttaatgcctgatcatctgccactgtctcccatcactcccagatgggactctctagttgcagaaaagcaagctcagggctcccattgactctacattatgatgagttgtataattatttcaatatatattacaatgtaataataatagaaataaagtgcacaataaatgtaatgcactcgaatcatcccaaaaccatcctcttgccycagtctgtggaaaaattgtctcccacaaaacccaggtgccaagaaggttggggaccactgctcttcatccagtattagagagtccttgagagtcaccctgaatgagcttgggatcagccagaatagagctgctctttgtggatatcccatccatgcccctgaggctcaatcctccaacataaacaggaaatgcctcaatcaagagccccttcacatgtgagaagtgaaggatactggaaaggagcccacccccaatatcattcctctttatctgctatagtacctgactttctattcttaggatacaggcatatattttttggtagttggaaggtgcgtatgaaaaacaaagtacccctgagatgggccaaactcattaggagttgccacaactggcctactgcctttgcctgctaacagggatgctagatttaaaaaaaaaaaaaaaaaaaaaaaaactgaaaagtgattcaaagagcaggtgtctttgagaatgccagctgtcagttatggggagcatacagaagagaggaagggagtgaaccctaccctcaggcctatccaggctcccagtgtttccccagttcccaatggactgagttatcctgagggacaattgatccatgtctgagaaaggacagggaccacttcagtctgggtcaccagaaattcttcctacctgaggccaagttacgcagagtgatttccttagccacataccagtccaaagcagggctatcattttcactcacaataattaaaattgcttattgatggtataaggcaaaatgaatgaaaacaaaatcgaaaactcagaacagaccaaagtatatgtaagaatttatcagccgggcgcagtggctacgcctgtaatcccagcactttgggaggccgaggtgggaggatcacctgaggtgaggagttcgggaccaacctggccaacatggtgaaaccccgtctctactaaaaaaatacaaaaattagccagacgtgatggtgggcacctgtaatcccagctaatccggaggctgaggcaggagaatcgcttgaacccgagaggtggagtttatagtcagccaagatcacgccactgcactccagcctgggtgccagaatgagactctgtctatttaaaaaaataataataataataatttatcaggtcttttcaagccattaatgaaagcattgattagttcttaaatgatttaaagataactgtttgaaaacgttaaatgtcataactctacctccaaataatgtaccaaaataaattcaaatgaaccattaaaaattgaaatgttagaaaaggacttaagtattagaagaatatataggtgagtacataaactcatggaaaggctttctgaatatgacaccagatacccaaacaaaaaaggaaaaaaaagatgtactacacttaatgaaatttttaaaatttcattcatcaaaaaaatcactataatgtataagaaacatctgtgtggccaacttggaggagggaccagggtgcactcctcccttctccatatatgtgagatctgtctgtgtgattacatctgatgtgcccttttggtggcatccagaaagctgcacagtgrtggctctaacaacacatgcatctctcctaatgagagagctctcaattattataaattactcaacatgataaagttaaattggcttttaaactacrctgacattatcacaagaaatttcaacattatatctgtaaacaaaatgaaaagctgttagattattttttagatatagtttctactattataaagttctagtatttttcttaaaccaccacaaaagaaatttgaacwctgccttagtctgcttgggttactatagcaaaatgctatcaactgagtaactcatatataacagaaatttatttctcacaactctggaggctgggaagtccaagatcaaggcagacgcaatgtcagtgagggcccactttctgattcagaaatagctccttctagctgtgtcctcatatgatggaaagaatgagggatctcttgggagcctattttattaaggcactaatcccattcatgagacctccactcatgatctgatcacctttcaaagatctcacctccatcaccttggagtttagaatctcaacatacaaatctgggttggaggacacacaaattcagaccatggcaaagacaaatgccaaaatcgaaaacatatttgcaacacttatgaaagataagtggtcaatggccttaatgtagaaagagttcttactaatcaatagggaaaataaattaacattacttggcactcctcttcaaatgcttcatctaagggtgggggcacttgaaagtgtttgcagttatctaaagaaagatacttctttgtgtcacccacaattgcacggtttcatatatatatactcaatgctaaagggtaacttgatagctataagatggcaatcagtgatactgaacaggtctyttccactgtgtccctcggccttcccatcagcccagtgagtaactcgaattagatgaactccccattccatgccagatcctgtttcctatgactttgttttggagatataatttatatactataaaattcaccgtttaaaagtgtacaaatccatggtttttagaatattcacaaagctgggcaaccatcaccactgtctatttctggaagattttcatcaccccaaaaagaaacccattagcagtccctccctattccccgctctctgcaaaacctggcaaccaataatctacttcctatctttggatttgcctcttccagatatttcttacaaatagaatgcaacatctagctttttgtccctgacttctttcagttaccataatgttttcaaggttcacccatgttatagcatgtgtcagtactccactctttttatgaattaatagtatttcattgtgtaaatatatatactatatttcatttatcagttcatcagctgatagatatttaggttgtttccacatttgggctattacgaacaatgacattttatgatgcccaagagatktcagtgtgagaaacagaagatgaaggtgcagtatgtgggaaaggcccacaccggtaaagcagatccttttccaaaaatcaataggtctgtagttgggagtgtaagcattactgcaagacaagcaaggtcatcaccagttaatcctagaagtattctagttctctaagcctgaaaactaaaaagaagcgtctgtcagaagagcctctggcacacagatgcaaccagcrtatgccagtctcataggaggtccacaataggtgttctatggatgcagaagaatctatagaaacagcccaagaagagaggcaggaaggtctttttgttttgtcttttctccagtgcaaatccagaaatccacagcaaaagccattctcaagccatgagaaaacaacaaagaggaagttttcataatccctttgcatcacagtttcaaaattaggctatatttcaagtaactggtggtctgacacttagccatataaactcaggacctgattgaggtgaaaggataacagcaacagagccacagatcactggattgtttcagtgggctcagtctcctgcctgtctcagttttccccagtcgccatcgtgttactgacccaatagagaagagagactcctaagagagagggtaacccagagacctcatccatgcctgccagaatgcttgaggaaaaattctctactcaaaagataaaaatgaagccttcttttgtggttttttcaggaatcacctttgtgcctgggagcccccagctgactgccaagaaaattcgctatcaattacgcatgtctaaggcccagtgcattgtggctaatgaagctatggccccagttgtaaactctgccgtgtccgactgccccaccttgaaaaccaagctcctggtgtcagataagagctatgatgggtggttggatttcaagaagttgattcagtaagtggacactgaatatgagatgcttaaatgaaggaaatgtttgactttgaaagatgatgatatatgagaaagtggtgtgagtggtcagaatgaaaagctgaatggcaatttctatgcaagatkagatgatgtatgagaaggtggtgtgagtggtcagaatgaaaagctgaatggcaatttctagtcctgaaaaaagcagagtaacccccaacacaagcatccctggtctgacctacaagttcccagtctgagtgaaagtcttatgttctgattcatatgtaaccattcgttctgaaaggataaaaaattaggtaatataaatataaacatattacaaaaaacataacaaaaaacttatatatagactatatataatggaatactatgaagccataaaaaatgaaatcatggtcgcacatggtggctcatgcttgcaatgtcagcacttcgggaggctcatgcctgtaatcctagcactttgggaggccaaggtgggcagatcacctgacatcaggagttcgagaccagcctggccaacatggtgaaaccccgtctctactaaaagtacaaaaattagctgggtgtggtggcacacacctataatcccagctactcaggaggctgaggcaggagaatcgcttgaactcaggaggctgaggttgcagtgagccgagattacaccactgcactccagcctgggggacagagtgagactctgtctcaaaaaaaaaaaagaaataatgtcttttgcagcaacatggatggaactggaggacattatcttatgtsaaataactcagaaacagaaagtcaaataccatatgttctcacttataagtgggaactaaataatgtgtacaaatggacacagagtgtggaataatagacactggagactcggaaaggtcagaggatgggagaggatgaggaatgagaaattacttaatgggtacaaggtacaccattttggtgatggttacactgaaaacccagacttcaccatatatatatgcaatatccacgtaacaaaactgcacttgttccccttaagtttatacaaaagtaaacctcaccctcactgggatatggggaaatacttattaaaatagygagatgatgccatgttcatcctcaagttagccaaatacagtagtgcccccttatctgtggctttgttttctgcrgtttcagttacctgtggtcaactaccgtccaaaataggtgagtacagagatcacatttgcataacttttattacagtacattgttatattctattatttgtttttgkttttaatctcttactawacctaatttataaatttaactgcatcataggtatgcatgtataggaaaaagcatagtgtatatagggcttagtactattgatggtttcaggcatccactgagggtcttgggacacatcccccmcggataaggcaagactactaaattaagtttgataattatmaatgtggtctttagagggcagtatttcagtgtccagggatgtttaaaaaaaaaaaaaaaaaaaaaaaaaaaaagcagtaaacgagacagtcaaaccccgaccctcatggattttatattatagacaacaaatagacaacaagaaaacacataaattatcaatataataaagtttccaaaagaaactccaaaacaaaacaggcaaattaaataaattggtctgatgtggaratgggggaatgattttagatttggtgacttctgaggtgaggataagctgagatttgaatatgacagagctagcctttggaagctctgagggaacactgtcccttgcagagggaactcagaggtaaaggacctgaggtgggagcgagcttaaactgtgtgaggaacagaaagaacaccagggcacctgaagtgcggagagtggggaagagagtagcaggagaggaggccgaagcgcaagggaggggaagactgcggcaggtcttggaggtcatgtaggagtcgtctaggaaacactaaagggaaggacttgatctcagccacaattgtgaaactccctcaactgctgtctgaaaaatgggagacaagagagatagtaaagggacccaggagaaggctgttgctgtcgtccagatgagaggccgtgccggtgtggaccatggtggtggcaatggagacaggaccgaaaacaagccaggcaaatgaggaactcacctcaggcacaaaatgtaaaagggcactgaaaaatccagtgatcgagggaaataatattttaattttaaaataatttttaattaaattataaaataatttttataaytgaagttttaaatttccacaaatatttattttatatatttatgtaatgttttcataatttataattttataaactgtatactcttttcaattgaataatttaattttttttaattaaaaaaatcaaattggtaaacttctcatgacagaccagctgcctatttttataaataaagttttattggaaccagggacaggactgggctgacaggtaaggtgagtcatgcaagtgcctatctggattataggctgtgtgaggactgcatcttgaagccggcctgaatcccattcctaaatcatactgggaatatytgaacagtttggaagtgktgttgtcctgtctttgttttaaatttcaatattttgtttatcatggatttttrcattagttttcattatttaaaaacatttcactaaaatattatttatcttgactactgaatttgctggtatccccttaaatatcacaatgtttgtggcaaatgtttcactcactccaccttagtcccatccctggttaggratagtgaagagagagagacttgtgacatgttttggaagtagagttgtcagggcttggcaatggttaggatgtggcacagatagctaggtaggtaagtcgatagatggggaaagaggaacaataatgattactacagatttttgacttgagcaattgaatgaataaagagggtcttttactgagaaaaataaggctggcgtataaatgcatcatatatttcttatgcaacaaaaattaatgcaaaaaaaatttaagggaaaaatggcagctgcccctctaacaaataatcctcaaatatatcaagataccagctgttattttttaaaatcagagattaccaaacccagggcctaggcacttaatcagmgaacctaaatttagatctcactgttgcctctttcctggcttacagagttgcccctccaaagcagacctacatgaggaccaaaagccaagatccaatggccatattcttcaccargggtacaacaggagctcccaaaatggtcgagtattcccagtatggtttgggaatgggattcagccaggcttccaggtacggttctcgyacagcctgtacaggcctgaaagttgttctcttgcaggtaaagggagcttcatgggactaaagctaagaaasgagtttcttactcaagactgcagaaagtgtcaatattgagagaaggaacagggctgagggccccaaaagatgaaaagcaaattactatagttcaaaattctaagagtaagcaggagggaaaagaggaagagcagggattccatgcagtaggtgagggatccaggatgatcaccccaaagacacactgtgggatgttacttgtttttctatgctaccagcaccagggtgaacaattgtgttgaccactatatgtagtgataaacacagaggtagagtcataattgataaggggtttgggttctagagtcagcctctaagatgaaaatcacatgtcatcacaccaccccttttttaagaaaattagttaagtagctcatgggtatctctcggcaaattcaaagggcactgaaactgatttcaatctctttggttgaacatgcaatgaagtagttggcttgcacttgtgttagcttggtttgtctggggttaagtttccccaccttacattcaatcctgccttagacaaatggttgtgtgttgttactccaccctcaagttctcttaacaaactacacaaaggtcccttagcggaaataggtgtatgttcctcaccttcacctcaaagtctttgactctcataagcaacaacggccagtagatatcaggtagagaaataaaacaggggaagctgagatcactgacttaatcaatccattaattaataaaagtgcctactggattaattaatttaattaattaataaacttctgagacccctgaaagccataaaacctggaaggcaatgccatgccaattaagactgatactgaaaaaatttaaggagtccattggcctcatgacctcataaayaggctttgcctgttttcatttgtgtgatctttgtttctccccacaggtcagggcttgataatagcaagtattattgttgttgctagtaccagcacgagagaattcaaatggctttcctctttctctttagacggtggatggatctccagccaacagatgtcttgtggagtctgggtgatgcctttggtggatctttatccctgagcgctgtcttgggaacttggttccaaggagcctgtgtgtttctgtgtcacatgccaaccttctgccctgagactgttctaaatgtaagatcaattcctagtgtggaatgtgtgggacaaaggccagagagaggcattagcaatgacccagtgactcatgcccagaatggggcaaatcaagagttaaatttggaatgtgatcttgacttgaagatgctctccctgcttgtgagagcaatgctctctctcttccctaggggctttgcaattaggaagacttggctacttccattgtatcactgagaaggaaacttttaaaagacaatagtgatattgaggaagataatattaatatcagttatcatttactgattacttactggcacttcatatggattatttcatctccccaagaaccctgtgagggaagaactggggaaactgattctcacagaggttaagtaagtagcctaaggaatcacagaggcagaactaggaattaaactgtggtctactgaactccacagcacaatttctacactgctgtgctaacctctcaactgctgcacaatccacaattttgctggcaacatctaggcttattatttaaagcgacaaagatcaaaacaaggcttcttggatccagaagtaaatgcctcgctgtgtatgcattcggttatcagtgattaatatgatagctcctatgttcacagagctaaagctaaattctctcccaaggtgtggaaggtggggaatcactaagtctttgagataaaaggcatccccaagctgagtttcaaagtctgtgaccctcttccctggactttcccgcctggacccctgccacagtctcactgtctctcccacctcacatgcagattttgtttttccttcctttggggcccaggtcctgtccagatttcccatcaccactctatctgcaaatccagagatgtaccaggaactgcttcagcacaagtgtttcaccaggtaagagaggatccctcaggagagagtccatttccactcatggtaccataaataaaattaggaccccttaatttgttgaagtagatccaatcttaccctccggtaacacacttgtcttgttgccattcatgacaacaactccattagtgtgtgtgattttttattcccttgcaacttgaaatccatatcttracccagaacataaaattaaattataattagaaggttgagtttgttaaaaaatttataattatacctccctttaaaaagataaacattaaagacaaatatactacctttaattcaaaaagtaaatattaacccatttcccattttgaagaaaaaaaaatgtgtaattcaccgccagcactcatttctcagagcaaacgggaaatgagttatagacaaagaccaccttctctcttggatatgaattcttctaggcctttttaaaacaaatttatacctatgtgtatctacctatccatctatcccaaaagaaacatattatgatattggggtgggattatatagatggtatctgtttatatcatagtgaaacttgcatttttttcacactattccttaaagctctatttatgataatatgggtaatacatttttaatcattgcatagtattctttagtatgaatgaattgtacattaataagccaagtacctatcaaagatagttgaatcttttctaagctgctgaaatgagcatcattgcacacaccccacaattccctagggtaccaactaagaagtagaattgccaatcatcatcgataaagattaatgagaaatcacaggttctcaatcattgtatcaagccttagtgtttgctaaataatcatttaagtgtaaatttcattttagctatgtgggcaaggacataaactctacagaaggaaacaaccatggtagcaaacaataccaccgtattaaattatgttgacatgaaggaacgcctagttcattggcattttgtggagcagttaaaaatcgctatgattaaatatggtatatctttattcagcaacattccatctcatataaaatgttcagattatttcttaaacccttaaaagcacttaaaaattttaaaatagtcatctctcgcttataccctgaaattaataatataaaggcaatgatgtaatggtatatttgggattaattcagaatcagttctccaattttgatcttgcttagtcttgggacctaactgggcaggcagttattatctaatacagatgagctaccacattaccattaatatggtacattcatgtattcagaatatacagggtcactgcctctatctgagaccataaaaagttttgctataatcttcccacacttgacccttccactggacatcaccaaaatcaaataaacataaaatgaattgtgggtttataaaaaatgctcactactattctattatgttggggcgctgtggaaacttataatatctagagattttgagcctagtttataaaattagtggctctctttccacctccagacttcagaaaattagttccttttttaccttaccattgctgacacatccttcacaaacacttctggctttgggagaggtaataaaactcagaagggtttctgcagaaggctggcttcctgccatcagttagcactggttgatttgcttttaacattaatgccgcttgtccagaagagtaaatgagagtcttcatggagattgatctaactggggtgtctgaatagattatctaatagagtagtattaagaacatcaaccaccacttaatgagcatttcctgtattggaatawctgcatcatttttccaagattctttctaacagayctgttattggtagaaatattccctgaggctaagaacaacttttgatgcctctccagctacagattcaagagtctgaagcagtgtgtggctgcaggaggacccatcagccctggggtgattgaggactggaaacgcatcactaagttggacatctatgaaggctatgggcagacggaaactgtaggttgatgctgactcactatttagccagaaaccaaacttgcccattcactgtgtaagcacactgtcaragcactaagcacgcactagaaatgcacaactggatcttaagcacaggaagaggaaatggcttaaactagggagacccctcttccatgataagacaaagaattacaggtacagataacttacagatttacagatttcacaacagaaacttgaactagtttccacctgacaattcctgccctctttgtggagtataaggcaatatcatgtgataagaatgaaaaaatsatggggtacaagtctgagtggaggatgtttaaaattatcactgctgaaaatggaagaaagagtagattatgaaaataaaggagaaatgggttatgataagagcacatttgaggttggagagcattaatcttcaaagtcactaactatttagttgtgtcattttctccaatatcactctaaaacacagatgaaaagcatggtaaaagtggacagttagattggaacaggattaacattttgccaagaaggtgcaataaaagggcagcaggcaagggatatagggatattggcattaagatgaaagactaagaaactaagctgatcagagaaggaagggaattcaagaaaaggcagatcagtggtgagaagacaaggcactggagatgtcaatggagctggaaggactgaagataattgtcttagtctgctcaggctgctgtaacaaaatatcatagattgagtggcttaaacaaccaaagttatttttctcacagttctagaggctggaagtccaagatcagagtgccagaaaggccgggttttaggaagagtcctcttctaggttgcagactaccaacttctcatggtgttctcacrgacagggagagagagagagaccaagctctttccaagctctttagtgtctttcagtttgtttgtttgtttttaaagagaggcagggtcttgctttattgccccaaactagagtgcagtggtgtgaccatagctccctgcagcctcaaactcctgggatcaagagattctccaacctcagcctctcaaacagttgggactacaggtgtgcaccaccatgcttgctatttattttattttattttttagcacagacacagwcttgctatgttgcccagactggtttcaaactcctggcctcagggaccttcccacctcagcaacccagcatatccaagatgacagacacaattcactgtgcccagcatctcttcttataagggcactaatcccatcatgagrgtgccaccctcatgacctcatctaaacccaatgacctcccaaaggcctcatctccaaataccatcacagtgagcagtagggaattagcacataaattttgaggagacacatcacactccctggagatcaggatcaaggaaggaagagactgggggtagaactgatcattcatatggctgcaggaggcactagggatgacagcgggacctggaatcaaaggaaagataatgaacctcatgctgaaggccttaatggataaggaatgactgagaggttggtaaattatagacaacaaagagtggtatagggtggtaaatgtaaatggcatgaatctcaaaaagacaagggaattgcacatagcgtcagagaagtaatggtcagaaggtggtattgggagctcaaaagatgccaaacccaaggaatataaaaggatcaacatcccccacttgaaaaaaataagtagaaacctcttcccatggaagagccaggtctctggaaaggtaactgatgaagagaacatccagtaaagaggatatagatgtggatgtagaatagttccttaaccactcaattgatgttctatctagacaccatgtgaaaagtttctggaaggaaagagtcagggaacaaacagtcctgttcctgcaacatgaggatgaaaataagcagraaagcttatatgatggaaacaccacagataagaatgtagagctggtaccttaggctggtggccaaatttttacatgaattggtttcagtgttttccaggtagataggaacaaaagaaaatagagaagtgggccaggagcagtggctcacgcctgtaatcccagcactttgggaggccaaggcaggcaaatcacraggtcaagagattgagaccatcctggccaacatgtgaaaccctgtatttactaaaaatacaaaaaattagccgggtgtggtggcacgcacctgcagtcccagctactcrggaggctgaggcaggagaatcacctgaatctgggaggcggaggttgcagtgagccaagatcgcaccactgcactccagcctggggacagagtgagactccatctcaaaaaaaaaaaaagaaaaagaaaaagaaaatagggaagtgttgcctggattaactgcattcactgccagatggtccataaaataggcttcctgagaagcaaaaacacaaaatatttttgagagaattgaatacccaatrtttttaaaacattcaaatagacagcatgggagaaataagaatttgtggtggggggcagggggatttcttacatttgttttatatattactactgtttttattaattatactaagaagggaattccataatcttggtaacaccaaagcctttttataggacttagttctgtcatacgtccaaaaaaaattctttggtgactaagaaaacctcagactgtgtgggagaagacaaaacagccaaattgatagcctaggctctggggagaggtctatagtttgaggaccctggtggagctatgtagttccatatggctcmrgaaacatcctcacttagaaagctaaagaaaattcagaacacaaggttcaaawctttgagacctcatagtcaagctcacgcttggtacgcaagttacaattcaaaactgtaaaagagggaacttgagaaatgatcaaattctgtctcagattctgtctatactacactcacagatccatttaattacatccaaagagttgacattttcagcacccaggactcattgcattgtatttccccactgatctcaggttgtgaatgattctgtctagcaagaaaacagcacatcttaggcagtaatgattttggctttatctttctttttatgaaatacaaatataactgacactcagaacatctgaaataaggcaaggttgatacactaagttgatatgactccagcaacacctaataaacttggcatttttagttagtcacacaacctgcatgggagaaaatgtacatcttccatttaattgtaatgtactggcaatagctaaggagtcttgtgttttgtgagcattatttgggatgcaagtgatggaaacatatttcaaacaagcctgagcaaaagtggaaattataagtccattttgctgggaatagcttcaaggcttacggaatcaagactggagaggccaaaacaccaggactaaaaaaactcttaaaacatcagctctctctttctctccctctcaattgctccatctgcttttttctctgagttgttctctgatgagtttcttccacaaagcagacaagattaacaccagcaactctggagtcaccactccttcagacaagatcaaaatagccctacttctacctctactttggaaaattcttggaacagactctgattgtccatgcttctgtcatatgcttttcccttggactataacttaaggggcctaacctgagacatttgttcatgccaaaaagtggatctacagaaccatgattaatagtcccaccagattagatgaagggaaggaggagttcttaaaggaaccataaaactagttactgcggtacactagagagagattactatggccatcctcaaaaacattcagaatctgggggctccaatttgttagcatgtaaacacaagaaaatattaagtctctttccgtgtaagacacagcaataggtactggaaaaataactatgtagaagacagaaataattcctgttctaggctgggaacagtggctcatgcctatagtcccagcactttaggggtaaaattctaataaataaaattttctccatcccattacacccatggttgactcatccaagatccagttctcatgtcctccaaggtagacctctgtgccctctttggggtgccctgcatgtatgctgaagtatttctcagcagccaacaattacttatttttgagacatttattattgaaaatctcaaaagacaaaaatagacaaaactgtatttgaattcccatgcatccactgcccatttcatcaattattacctaatcctgttttatcattactcctctacaatcccaaaaacaatattttctcataaatagctttagtatattttaaaaaaargcactaaaaaacaaacatattctccaattatacctgaaagttaacagtaattgccttttattaacaaatatctaccactgacattttcatccatcatctaagtcatgcatgttttctkgctaccatttgttccaattaagcacacacattgtggctagttggtaagacttttgtgtatcttttaatctatgaatttcctcattaccttcttttttccttgaatttgttattttaaaaaactgagttgttggttcttttgaatatttcacagcctggattttgctaattgcagtatggtttacatgttcttctgttcccctgcatttcctgtaaattgacctagaggttaatttagtcacactcctgctygatttttttttaatcaagattacttgttagactgtgtaatgttgttctgttaggaggcacataatgtctggttatgatcaataactagatccattaatttattgcttttttaaagaaaaacttgtctgcatttctttgaacagggtctactctgtgccacttccaaaacaataaaattgaagccaagctctctggggaagccattgccaccttatattgtccaggtaggagatcatagtaatgattatgacagatattattaagtgagctsttacagttgtttatctaaatttctgacataaaggtaggcaatgaggaaagtccascattctctaaattcaccccaaggataatctcacattattgcttttatttccacctcaatatccttttggaatacaaagcccagacacaggaatgagggaaggagatgctgacaattttgcagaatatccctttaatgtagttcaagtttcaaatatggagaaatcgaataaaaaaaattgctattaaaaagatatgtgcaaaataaagacaactattttgaatgcaccataataagcrttctgtacttgaactaaaaatatactaaagtgggaagtctaagccactagtcagctgctcgggtgtcgattattataaatactgtaatgtgattcccaaatgatgtagctgaattcacagtatgggcataggaagcaatactaagatggtagggcaaatgctgtgtctaggattttattacataaaagcagactcaaattagcagcacttatgaaattaccattattcattttaagatagtcctttgctttcaygcctatctcgcctttttttaacattggtcaaaaggaaatagtaagttctcaacctgaatgaaacaaatattagtatttactttaactattgtatcattctgaaattgacccaattttgttaaagataatgtttactgtagagttctattttttgttttttgtttgcctatccagtttcactacatattatttaacaggatgtggaagttaacctaatacattgaggtttatatgtttgttttttccagtaatcatgaataggtactacattatattaaatgtgttttctgatcctattaaaaaggtaaaatagtttttctctattaatagagttaattaaaaatattttcaaatgttaaattttcgttgcatttctttctttttattttcttggatttaatttcttaatttttatttgtttgggcctttgcatttagagacatgaataaaatgagcaygtaattttcctctcaaaaaataagaaaaaattaaaatgttccttgcatactaaagtataaacaaaaatgaaataaatgaaattgaaaaataaaatgttccttaggattttcttagaaaaaaaatcttcctacaaaatcaacaaaccttagaactaagaaaaacaaatgagaaaaatacacaaagaaataaaatcagaagtgaaagaggagaaactccaactcatgccatagaaatgtgaagaatccctatagaatccctatgaataattatatgtcaacaaagccaggtgtggtggtgcatgcctgaaatcccagcactttyggaggccgaggccagtggatcacttgaggtcwagagttcaagaccatcctggccaacatggtgaaaccccgtctttacaaaaatacaaaaattagccgggtgtgatggcagatgcctgtaatctcagctactcagcaggctgaggcaggagaatcccttgaactcagcaggcgggggttgcagggagccaagatcatgccactgcactccagcctgggtgacaagagcaaaactccatctcaaaaaaaaagaaaggaaaaaaattatatgtcaacaaaatagacmacttagaaaaaatggataaagtcctaaaaacatacaacctaccaagactgaatcataaagaattaaaaagtcagaacataccaataactaacaaagagattaaattagtaatcaaaaaccttccaacaaagaaaagcccagcaccaaatgccttcacagatgcattctaccagaatgagggacaaagatgacatgataatctcaaaagacacagcaaaagcattccacaagattcaacaccttttgatgataaaaattctcaagaaattgggtagagaagraacttacctcaacacaataaaggccatatataaaaagcacatagctaactaacatcatactcaatggtcaaaaactgaaagcttttctctcatatctggaacaaggaaatgatacacattctcaccacttctatccaacatagtattataattcctagccagagtaagtagaaaataaaaggaaaaaagaagtattcaaatcagaaaggaagaagtaagattatctctgtttgcagattacatgatcttatagatgtgcagaaaattatatttctacatatggtataaagaaaagtctaaagattaaccaaaaaaattaggataaacaaatttaacaaagtttcaggatacragatcaatacacaaaaatcagttgtgtttctatacactacaataaattatcaaaaaggaaattaagaaaacaatcttggctgggcaaggtggcttacacccgtaatcccagcactttgggaggccaaggtgggcagatcacttgaggccaggagttcgagaccagcctggccaacatggcaaaaccccatctctactaaaaataaaaaaattagccaggcatggtggcatatgactgtaatcccagctactcaggaggctgaggcaggagaatcacttgaacrcgggaggtgcaggttgtagtgagcagagatcacaccactgcactccagcctgggtgacacagcaagatctgtctcaaaaaaaaaaaaaaaaagtctaactcatagatctggaaagtgaattggtggttgccaggagctggtggagaggagaaaacaggaaggtatccaccaaggggtacaaaatttcagctacacagacagtaactactagagatctactgtacagcataatgccaacagttaacaacactgtattacatacttaaaatcttgctaaggagatatattaagtgttcttattaccaaaataataataataataagagggtgggaggaaacttttgaaggtgatgaataggtttatggcatagattgtggtgacagttccatgggtgtttacttatcttcaaactcatcaagttgtatacattaaatatgtatagctttttgcatgtcaactatacctcattagagggtttatttttttaattcaggtgagaaaggagaagaggacccacacaaagggggaagatgaaagagatattttttaatttgtcaaatgaagtataacttcattccttacactccctatccaaaacacgcacacatacagacacacacacacacacacacacacacacttcccacaaagaaaaacaggcccaaatggctttgcggtgaattctatctaacatttaaggaagcattaacattaatccttcacaaactctccccaaaaacatatracaccaggattttggaggctgtgtctcaaaatggkgtcatagtatgagccaggatcatcctgataccaaaaccaaagacatcacaagaaaagaaaaccataaattaatatttctgattactataggtgccaaaaaawctcaacaaaataccagccaacctaacaaggaacatataaatggattatataccataaccaagtggaattattccagaaatacaaagttggttcaaactataaaaaccaattaatayaccataaaacaaagtacacaaatcacatgatcatctcaacagacacagaaaaatcattgacaaaatctaacaccaacacctatttatggtaacaaccctcaacaaactagcaatgaaagggarctttctcaacctgacaaagrgcatacagaaaccccatagctcacatcagactcaacagtaaaaaactgaaagtgctcccactgagatcaggacttatgagaatattcactcttcatagaggttctatccagagcaatcaggcaagaaaaagaaatagcatcccaattggaaaagaagaartaaaactatctctattcaacatgacatgaccatgtatatagaaaatcctaaggaatacacacacactattagagctaaaaattgaggtcatcaaarttgcaggaaataagatcaatatacaaaaaattattaatagtatttctacatagtatcaataaacaatcaaaaaataaaattaatagaacartctcattgaaaataaaattttttaaatctcatttaaaaatgtattctctagataattcatctaatttactagacttagtactaaatgccacttcttttcccaaagtctaaagttcgtcatcaaagtataaagatgtattatccctgaagacctctgatccttagggctggtagtttccatagaaaagtttccaagtattcagcaaggataataaattcaaaatgagtacgcatattgctttccaaggtgacaatttggaaggttgtagccctcaaaattgagctagcatctcagtgtactttttaactcctgtcacattacttcatggtcatgccttccatttcaggtcaataaagaagccactcggctgaaataagtcattattttcttttttgagacagagttttgctcttgttgcccaggctggggtgcaatggcatgatcttggcctcccrggttcaagcaattctcctgcctcagcctcccaagtagctgggattataggcatgygccaccacgcccagctaattttgtatttttagtagagacagggtttctccatgttggtcaggctggtctcgaactcccgacctcaggtgatctgcccacctcggcctcccaaagtgctgggattacaggcgtgagccaccacgcccagccaataactcattattttyaaactgtattttatttattcctaacctgccctctaattcttaataggaaaaaataacaccacctcctagactgttataaaactgccaaatctgtttttaaattttcatgttctttatatttcttttcttatacataagatggctaattaagtgtccttgtttgaaaggcctttctgagatgctggctttcttaaaactttgtactaaccaggcaatggagcccttacctgtattgtcttatttcatcctcacaataaagctgtataataggtgcactttaaatctctgattttctagatgaggaaactgaggtacagagaagtatccaagaatctcmgagtcagaaggtgtcagagtggacatgcaaacccaaatatttccagctctggcaccctcacactgacgactgaaccacactgcctcttaggttgcccagtatctaagtacaccaaccaagcactttcctggcatcttaaatgggggtagaaaggcttaagtttagatcttgtggtgttttaggaagagcacaagtggtttgtaaggaaaattcctttagtgattatctaatttcagattgtggatgaaaactcaaatctyctgcctccaggggaagaaggaaatattgcaatccrcataaaactaaaccaacctgcttctctgtactgtccacacatggtaagaaaattttcttctttcctaaatactttcattgttgctactaatcrtagtgccattattgttgagtactttatgatttgccaaatacttttgtcccaatttttaattttgcaaatttttgagtctccaaaaatgttaaatagtagcactcacctacattcacttcttattaagattttgccccatttacttcatatttgcacatttttgatgagacatttgggagtaaatgcagacattatgacactttgtccttaaatatttcagcagcatcctcctaataaggactttcttcttaaacatcagcaccatcacatctatgaaaattaaaaataattatttaatactatctaatatctagccaatacttagactttctcaattgtactcaratgtgttttataccttttgtaaatccagaattcaatcaaagttcatgcatttatttggttctcatatctctttagttgtttttatctataactgttccaccaccatgtttttcgtgacgtggacattttgaagaatagaggacggttgtgttaaaaamtgcctcactttctaggcttacatattgtttctttataatgagatccaggataaacatctttctcaagactattatgtagatgatgtatatttcttatttgcttatggggggaaacattaggttgtctcattttggatgctgatcattttgatcttttgattaaggaggtgagtgccatttccattgtaaaggtacattttcctctttgtaattagtaataatctgccgtgtaacaatttgagactctgtaaatatcctattctccaattaactttcacccaatcattttagcatccatagatgattcttttctttttggaaacaattattaaaataaagagtggctgggcacagtggctcatgcctgtaatctcaacactttgggaagctaagatggacagatcacttgagcccaggggttcaagactagcctgggcaacatggcaaaactccatctctacaaaaaaaaaatacaaaaattagccaggcatggtggcatgcacctgtagtcccagctactcaggaggctgaggtgggaggataaactgagarcaggacgtcaagagtgtagtgagctgggtgtgatggcaccactgtgctccagcctgggcaacagagcaataccctgtctcaaaaacaaataaataaaatggagggtgcagaacggtgattttcaaactgctatttcttatacattaattaggtggcattattccataaagatgagcagtccattttatctataaagagaggctttcttttaactacttttaaaatatttatttagcctttcctgataataaaactcacttgtgttcaatatagacaactttcagaaatacagaaaagaccaaagaagaaaagcatattaactcataatgccaccattcttagccactattaacatttgatgtgtatatatccttcattctttttctatttatttgtcttgttttataaaagtgggaytgtactctatcagcttttgtgaagcctgtttttttacttatgattttcagggatcagtaaatcttatatgacaactttttttttttttttgaaacagggtctcactcagtcacccaggctggagtgcagtggcacaatcttggctcactgcaacctccacctcccgggttcaagcgattctactgcctcagcctcatgagtagctgggattaccagctctcaccaccacgcctagctaatttttgtatttttagtagaaacagggttttaccatgttggccaggttggtctggaactcctgacttcaagtgatccacctgcctcagcctcccaaaatgccracagccaccgcacccagcccttatatgaaaacatttttaataattttataaaatcttatcaaggagaactatcatgatctatttaacatayctgctattgttgaaaattttggttacttccaatgttttatattgtaaatayttcttcaatgagtatccttgttaactctttaaatgcctctttgagtatctctcgtggagtttttgagttaaagcctaggtaaaacgttttaaatattttaataatttctgtgagagaataatgctgaatatttccagactgataacacaacttcaatacactgagactttaaaatcatgttctcacccataagacagattccaaagaagagacccagatatctcacatacctactgggattattgtgctgtttgagaatgagctgcttacacagcttttcacyaaagtttattagaactctaacaagcaggttgtccattagatctaagaatctggacacattggtgacgtggtctctatggcaatgagtcaaatgctgttagaatctggccgggcgcggtggctcatgcctgtaatcccagcactttgggaggccaaggcaggcggatcacctgaggtcaggagtttgagagcagcctggccaacatggcaaaaccccatctctactaaaaatacaaaaaaaattagccgggcttggtgatcggcgcctgtaatcccagctactggggaggctgagacacgagaatcacttgaacctgggtggcagatgttggcagtgagccgacatcacaccactgcattccaacttgcgtgacagagtgagactgtttcaattaaaaaaaaaaaaagaatctgtgaacactccatggaacgatcctgcaaaatgggccaatctcatgcaaagggaaattttcaccaatcactctaattgtgcttctggtgtaagaacctttagctgaagccacctttttctgatggaattttggtcaggggcggtatgaaaattaaasscacaattcaaagacagggaacagtgattgcatctgatggatgatgagcctgagaaaatagcagccaacactccttacacatactgtacctggccttgtgctaaaatgctgtgtccatgttgcctcatttaagcctcaggacaaacctctgagtgaagtgccatcattactcttgtttctagctgggacaaaaaaaaaaaagctgaagttaagagaaatgaccaaggaaagttctccgtgtttgttgagttttctatgtgagatcccctggagagtggggatcctgacttatttttctcagtctcccctggggctagccagagtgctcaattcatatcactaaatgattgtgagagggaagtaaatgtaggyttctggattcatcattctatcaggtgagctgggaggaatatgcttcagcaagaggccacatgctttacctcacaggtgacagagggatcatggatgaagacggctacttctggtggtctggtagagttgatgatgttgccaatgcattgggtcagagattgtgaatgctttggttattgctattgagcctggggctgtgggagtttgaagaagactctggactgcttccaatacgtaggaattatatttctaaagtttagaaaatgcaaacaaccaaaaataaaaaaataaaactcatccataatctcatattgtggagtatattcttctaatcttctttcttcttatacataaacttttttttttggtagaattgagttcagggagaaatgctctagcgtaacttgcctttttcactcaacaatgtaacagaaatatttttctgtgcaattaaatataaaaattcattttttaaattagtttatcacgaccaataagtacacagatcttacatgaatactgtcaggcctctgagcccaagctaagccatcatatcccctgtgacctgcacgtacacatccagatggccggttcctgccttaactaatgacattctaccacaaaagaagtgaaaatggcctgttcctgccctaactgatgacattatcttgtgaaattccttctcctggctcatcctggctcaaaagctcccctactgagcacctcgtgacccccattcctgcccgccagagaacccccctttttcctttacctacccaaatcctataaaacggccccacccctatctcccttcgctgactctcttttcggactcagcccgcctgcacccaggtgaaataaacagccttgttgctcatactaagcctgttttgtggtctcttcacacggatgcgaatgaaaaatagcccaatggatgtctacacacatacacacccctgtaaccgtctagatcaagatataggatatttttagcctcctgggctctctcatgtcctcatacctctgtgaaagctgtacttctttcatgaattttggacgaatttctatgcctaataacagtttcagagactgagaaaaggagactaaattctaaggagcaacaaattccaagggcagatggtggcaagtagataccatgggtcatcctgattcagagcttgctgaccacaaaaatcacaggaatgttgagaaatagaaatcaagatctaggttttatggactcattgctattacatgccactgcttctgggacgtgagtcagcaaacttgctttctctccactattccactctgatccttgacccaattaaacaatcccaactatattttgctcaggaagtctctctcctttgagcactccttgttgcagtagcagtaaacgaagtgcttgcctctgcctctaactgctctcaatttgtactttgagaccctcctccacaagtagcaattattctgacttctaaagtgcaggtcaaatctgcctgttcctgaatttcatataaatggaatcatacagtttgcacccttttgtgtctgtcttctcacaaaataatgtctggacaattcatttatgttgttgtatggatcaacagtccattctttttcattgctatgcagaattccattgtatgaatacacccagaatttatccattcttatgttaatggtgactgaggttgtttccaatttaagaatgcctcctttgcccaacaccgctgcacctgggaagttaggcattttctctcacccttgggattaagtgtgcgggtggtcaagcagcagcgatttccaagcccccctagcagctctcacagcaggtgtcacaaaagagtttgcaccactccaaacagtcaaaacgggccatccccccacccgacccccgccttctctggattttaaagactgtgtaggaggagaaaatggggacgggggtcccctggttaattcatttatcttaagttcccgtaaccaaactagcccctcagtttacgcctttgaccctcaaagttctttccacttcgtaccgtgagatcagaatccctgaaagaagcttcttgccctacccggctgaccatccttgggcactcagctgtgctgggatgctgttgccctatttcccgcgtagaaacaactgctggtggcgccgccggctgaagagtgcagaactgtggccctgagccaagctggggcaaatatgggagacgcgggatgggagagagtggggagagaggacgctatgaggattcttggagggagggaccagagcagaggtggtgagtggcaggaggaggcaaatgtccccgcaaccaggaagttcatcgggttgaagtttcctctgccgtcgcctcctgctcgccagcagagctgagcctggtgtgctgcctttctggaaagcctgccaccaccaccctcggcgtgggatgccggcccgcgaggaacctcggggacacacaaatggccgcacctgaatctggctgccattgtgactctgccgcgcacgcgcagctccatcccctttgaggcgcgcatgtgctcgccaagggggcgcttctgtcaggcctctgagcccaagccaagccatcgcatcccctgtgacttgcacgtaaaagcccagatggcctgaagtaactgaagaatcacaaaagaagtgaatatgccctgccccaccttaactgatgacattccaccacaaaagaagtgtaaatggccggtccttgccttaactgatgacattaccttgtgaaagtccttttcctggctcatcctggctcaaaaagcacccctactgagcaccttgcgatccccactcctgcccaccagagaaccaaccccctttgattgtaattttcctttacctacccaaatcctgtaaaatggccccacccttatctcccttcgctgactctcttttcggactcagcccgcctgcacccaggtgaaataaacagccatgttgctcacacaaagcctgtttggtggtctcttcacrtggacgcgcatgaaagcttcctccaaaaggaaagccagaggcacgcaggcctaggttgcctcgccgccccctgcgccctttcctgcagactggtgcatagtatttttaaaaatattgcgaggacaacgtcttctctgcgagcctggggaagaggcgaaaccacgggaagagttgagatgtatccagttaaccaggtagaaattgtacctccaggactcatcaaggctaaatataaaagttgcgtggtttttttgtttttgctttttgagactgagtctcgcttttgtcgcccaggctggagtgtaatggcgcaatatcagctcactgcaacctccacctcctgggttcaagtaattcccctgccttggctgggattacaagcgcccgccaccacgcccggctttttttttttttttttttttttaagtagagacagggtttgcccatgttggccaggctggtctcgaactcctgacctcaggtgatccgcctgcctcggcctcccaaagtgctgggattacaggcgtgagccgctgcacctggccaaaagttgtgtgtgtttatcagggacaacccctgtgctttgagttctacctgagctgtgaatctcctgttattactaatttgtctacagatgagtaaactgaggttcagagagattacatgacttatccatgtcatacagtgatcaagaagtggagccaggatttgaacccatgaagtcccactccagattccttcgtataagtttacacggaaaaaaatttttagataagatgtctaggtgccttctttcctgcctgctttaaaaaaaaaaatcagctggaagaattttttaattgtttttgttttcataattgataatcgtgtggggagcactaattccccaagtgggtcacaaggagttatcctgagcaggaatgctcttactgtcccccttgctcctgtactcataccgtctacctcttggggacacagcactaagtaaatttcaccgattgagtgttcctatgttctagaaaatggcactctacactcacaaggggtcgtatataagctggcatttcaactatgtcttcaacaggccataccatcacccttttatgctggccatttctgggtggtgcagattgtgatagatccactggactccatggtcatgtgcccactgctgtgcctcctttgcagtaaaatgggtccttggtcccacaaggccatgagggatcctgcgctagtggatctaaagatctttgtgtcctcagaaagtgttgtgtttgaggccctgtggacagcaaaggcaaacccaatatacctatatgggtctattcctgactgaataaataaatcactgcactttccaaaatggaagggatccaagctagtcagcttgccaccaagtggcttagctggtgtcttcaaaagatagcactgttcagttggtcattcttgctggaaggttgaacatttggcagccaatagctagattggccttgaaatagaagcccatcttactgcaaccacgtagagcctctgacaatcatggataccccacccacgcacccattacgccaacacaggggtgcccaacaacaggctggctcatgtccattggttaattcattttgtcaacctggtcacttactgtctcttccatggtttattctaatgagggttaacagaggtctatccacattcctctactccagacctccttgtcctgatcttctcatctttaccctctgatcagccaaccacatcattcaccactgtccataagtccaggcacatttatactgaagccacttcttttgccacacaaagtagatcattaggaatactaccggaagctctgcccagtgggaggacttcttttctccttacaaagccagctcaagaagtacagcagtgcagccaccatttcagcatgcccttacatacctagccaactcatccatgaatcaagtctgggcttcctcttccaccatctgctgctcatacgggatcccccatcagccatggggaattgctaagggaggggcacagcagtagaaagaatgagtatccaggcttccatgcccctacagctcacatatttccttcagccctgctcaagccttcctctcatctcatgagggattgctctggaagatgcctgaccttctgacctaatgagaatgagagaacccaaatcatgatgggcagttctgccacctgatgtcccatggtcaggggctttgtctctatccaagctgtggaagaatgccaggagttattttatgaaaagcataaagttctgtactgcagatggcagtcttgttctagaacccaaggggcttgggtttttattctcccactggtgtaccatcttgaaaactctgacatcatagggtctcctagatcacatgaaccaagcacagagccacttccactatagcctgcacctgctgcagatcacttttctgctctgggccagatcaaagctggcagccttgaagggaaacagaaatccaagatgtctttgttttaaggtgtgtttaaagttgtgttgtccaatacagtagccactacccccatgtgtctactgagcacttgaaatgtggcttgtgacaaatgttgaaatgataatactttggatatatagtattatataaaatgtattattggccgggcacggtggctcacacctgtaatgtcagcactctgggaggctgaggtgggctgatcgcttgagcccaggagctcaagatcaccctggacaacatagcaaaaccccacctctattaaaaaatataaaaattagccaggcacggcgacttgtgcctgtagtcccaactactcaggggactgaggtgggaagatcacttgagaccaggaggtcgaggaagccatgattgtgccactgcactccagcctgggtgacagagcaagaccttgtctcaaaaaatataaaaaagaaagtattactggccgggcgtggtggctcacacttgtaatcccagcactttgggaggccgaggtgagtggatcacaaggtcaggagttcgagaccagcctggccaacacagtgaaaccccttctctactaaaaatacaaaaattagctaggcatggtggtgcgcgcctgtaatcccagctacttgggagactgaggcaggcgaatggcttgaacctgggaggtggaggttgcagtgagccaagattgtgccactgcactccagcctggacgacagagctagactctgtctcaaaaaaaaaaaaaaggtat

SEQ ID NO: 94006 - DNA, 91177 bp, Homo sapiens
gcacctctgccacagcacccaaatttggctgctttccatgtggtctctcctgctaaatggtgagctcttcaaaggcacaaaactcactccaaatcttagcccacgcattggctggcccagagtacatgctcagtaaacacttgtagaatgaataaatgaatgaacaatgttagtaatcaacaataaactagaagatgcacatgaccaacattgaggacttctgggttggcaagaagggtgagttctgttccccagaagcagggccctcaaagaagctggttcctacgatccctgaaagggggaaggggactggaaggcagggtgtggtggactcctcaccgagctcacattcttcccttccattgttcctggcggctgcacatggaaagtacaacacccactaaggcccatgtgtttccctcctgccctccctcagcagggagggaacagatgggtgtaatttatgcccacaccctcctcttgcagccttggcactggggagaggggacgcaggggcagagacccacccaggttccacaaacttctctcagtactgaggcaagagagccacagcaggggctagctgggccaggagcaggagaggacaggcagaggggaggagggggataaaaagaacagaactgccatgtgggagtgtccatggcattccagcattgtgccaggtgggtgcatacattatctcagcacatttctgcaaggagcaggctcttgcacctacttgaaactcagagaggtgaaggaactgctccaaggtcacccagctggtgagtggctgcagtgtcagggttctaatccaggtctccctggttccaaaaacagtgtcctccccactagaccccactgtgggagaaagtcacatcttcaagcctccctgcaccctccctctcatgggtcatctagggccatgacaggcaaaaggaccctcaaggttcacattcttctgctgaaggaagctggacactaatgccaagactgtagaaaacacatacagatgagctggagaaggcaaagctggagagaaacacaaagatgagtgtggaaagggccaggggccaggtcctgtcagggcaggcactgccttggaggtgaaccctccgaaggtgactgtcctgcagccaatcctcaaagctggaaaataggctaagaatgatattctgagaaatgctgagctctgagacaccaaaacataccttcccttcttggccacctcttccctcttcctttaacggcaattgaggcaactggcatagaatccatgtttagggaatcacatgaacctggattcaaacctgtagctcctctgcatgctagctgtgtgcctgtggggaagtcatgtggccctcctgagcctcagtctctttatccataaaataaggttgtgaaaaggagatgactgggccggatgtggtggcttacacctgtaatcccagcacttcaggaggccgagggaggcagatcatctgagatcaggaatataacaccagcctgggcaacacagtaaaaccctgtctctacaaaacatacaaaaatttgctgggcatggtggtgggcacctgtaatcccagctactcaggaggctgaggcaggagaatcgcttaaacctgggaggtggaggttgcaaggctgcagtgagccgagatcgcaccactgcactccagcgtgggcaacaagagtgagactccttctccaaaaaaaaaaaaaaaaaaaaaagagatggctgaattcaacacgctattgctgcaattgtgtctattgagcccatccggtgctgttttggtttggtttctttttgctttatcaagtcagctacttgcaaaaaatgagacactgcacttaaaaatccagatttccagcttctttggataatcagagtgcctgcaagttggttctgcattgactcatagctacaatttagaggggatatacacacttcatttttccactgccccgttactccctcccggcctcatcaatatcacctgcccacgggatgtggcttttgctgcctctggtgtaaaaaccattttgaccttaaccctgaaactctgaccaccttgagtgcagtgaccccaacaagttctggttcaccaatatctccccagagcccagcacaaggcgtgggtcctagtaggtgctcagccattcatttgttaacaaatatatatgtcgagtccctactctgtgcaggaaccacgtaatatgctgaagatgtgagcaactaataagccagatatgtaaatgatgctcacaatacaatccatgagacaagttgtgttattatctccaatatttaggtgagctggggaaactgagccacagagaaggtaagaaacttgctcaagactccaagataaagaggagcagaggtagaattcagtttttcttctctagaaccaatcaatgctctgaactagggatctgcaaactacagcctataggccatctgtttttataaataaagttttattttcttatttttgtttatttattttgagatggagtttcactcttgtcccccaggctggagtgcagtggtgtgacgtcagctcactgcaactttcatctcccggattcaagtgattctcctgcctcagcctcccgagaacctgggattacaggcgcccaccaccacaccctgctacgtttgtatttttagtagagacggggttttaccatgtttgccaggctggtcttgaactcctgacctgtggtgatccacccaccttggcctcccaaagtgctggcattacaggtgtgagccactgggcctggcctaaataaagttttattggtgcatgaccacaaccatttgtttactttgaggctgctttcacacaacaatggcagaattgagtggttgcaacagagatcctttaggctctcaaggcctcaaatagatactctctagccctttgcaggaaaagtcagctgacttctcctctgaaccacgattctaagcatcctatcttcatgaggggtctttgcgctcataagatttctactgaggggagggggcgctttttaaaatacataaaagagatacatgtggccaggcgtggtggttcacgcctgtaatcccagcactttgggaggccaaggtgggcggatcatgaggtcgggagttcgagaccaccctgatcaacatggtgaaaccctgtctctactaaaaatacaaaaattagccaggcatggtggtgcacaccggtagtcccagctactcaggaggctgaggcaggaaaatcacttgaacccaggaggcggaggttgtagtgagccgagatcatgccattgcactccagcctgggtgacagagagagactccgtctcaaaaaaaaaaaaaaaaaaagatacacattacaatggagaggaccctggtagctactctactgagggtcctggaaagacctttgataaaacgtcattaagccgagatctgggtgacaaggagccagtcacatggagataggagaagagatttccaggcacggaccgcctggagcacaggccctaggacttgagcaagcatgggggttccaagaacaaaaagaaagccagcatgctcctaactcagcaggagagcaggagggcgcggtgcgggtaggaaaggatttggccatgaagggctttctgaaaacgtaaacggatgaactgtgcaggcctggaggagaccaaagcctcctctggcattcgctggctttctgaatccagatccttcctttaaactggcaggccctcctctccctggctatgaaaggagttccactatgtgccacgcttctgggactgaggcaataaaagactgatggaaaagccccctggaacgatgcagggcagccccgagacttgaaggctgcccctgatgtgtgtgctgaagtgagccagaagattcatcacccccaagagctggaggcccctgtaacccgggaagcttgaggctcccttcccagccaggctgactcacggcacagcctcccatgtgcactttagcctggggctgccttcccttcacacagcccttggctactggggaaggtttgccaaaaggaaaggtggccaggggaaggaggcactgaagggatagggtaaaagtcccatcaacttcactgcaaggaataattgagtttgctgggaacataaaagcagaaagcctggaagctgaagaaaaagtatgtgcacgtgtgtgtgtgtgtgtgtgtgtgtgtgtgtgtgtgtgtgtgtgtgttgacattgggaggcaggagccaaaaaggagtgcctgggtaatatgtgaccagggcaaaccaggttttctaactcatttatccagatcccgggtctttgctgtgtgggtgacgctaagcaactgtttgcatgactggcttgtcaaatctgtaaggatttgaaaaggggataagtgaatgatgcatggatgaaagattcggggtccaacaggcttcctggctccaccccttattagctggatgacctttgaaaaatcatttcaactctgagtctcggtctcctcaccaggaaagtgggactaccacctcctataaaaggctattttgcgggttaactggaattatgacacccttagcaaagtgcaggtggcacctctttcccttcctggattccctggatccagctgggtacctggcacagtgagactggataagaacctagacagcacaggagggactgggtttctgaggtctctgtgtgtctgatgcatgtagaatggtctagttcttcaggacacatagtcctgagtcctgagaacacccagggtatcaaatggtgctgtgactgagctttattaattagtgaattcactcaacaacaatacatggggcatctgctctgtgctggaccctgcaggaatgcaggaaatacagagatgaagaagaaaagtggtgttgggatgctaccagattgccaagtgggagaaggataaatgaaacattgtgggcacataaagaaacattggtggcatgagcacacaactgcatgaccattttcttaagttatttggacactaacatagctcacaaacagatatagctgccctccctgctcataggaaaacatcacctctatcaaaaagcaatcacacaaataactcaggtttcatattccaggcaaatgtggattccgttctcagctcctttaatacccaactatgtgacctggggcaagccattcactcctctgagtctcaggtggcttaaacctaaactgaggataatacctaccttctcgggcccagaggtttgacacggtggaacagaggagagagaagctccggtttgtgctactgactctaattgccctccaatattggttctccccttctctctcagaagaaccccatgatatttgctgagtacatggccaccctgaataaatcacagcttcccttgctgctgtgtttggccagtcaattaagttctgaccaatgggatagacttggaaaagttgtatacaatttccagagagtgtgcctaaaatatgctctcacttatctctgcctttcattcttcttgctttctggaatacagatttaatggctggagctgcaacagacaccttggacaaagaggtgaccttgagaataacacaggaggaacctggggctccaacactatgtcacatgccagccctggactagaatacctctgacttattacatggaaaaaaaaattgctgatgttacgcttgctgagggtttagaggaggggtgattatcgcccatcctcacaactgaattcaattctttctaactaattttcattaatattagcacaacacattcagggggcgagcactgtgtggtgggcactaccctataggcactgcctgcatttcctcctgagggaccatctgcccgacaatgcattgcctcccagacctcccacactctctcctggtttccagtgctcctccagtgagatcatgagccctgtgggatgctctcagagagctgagttcattacagctaacaatgactgctgctgaagtccggtggctgcaaggtcagaaatacaggaacacctttataaatgtacaaagatgagaacgtttccaaaagcaggtcccaaatttgtatatggttcaagttcagctgtgtgattcagcaccagcagcctaaaaagctatccatgtatgtactcgtccagtatgtacacacagaatgccttctccagccagggcactgtgctaagccccacaggctggaaggacagagaaggcccggtccctgagaagcagggrccaacatctgaatgaggaattaacgtgttcacacaaagcagttcacacaatgcactttattcattcattcagcaaatatttattgaacacctactatgtgccaggaaaagggctaagcttataggaaacagggaggaaataggtgaggaagaaaattagaaatttaatccagggctgccaattgaacaagaaaacagctgtcctcaccctctcggtcccaaagaggccaagcatcccccaaaactccctcactttgaagtccaaattttcctaacaatgaaaagagtcacagagcttaacaaatggacttgacttgcttacttgttggtcacaagaaagcagaggtcactagcaatgggaaaataccggcagtttcctttgttgtaggcgaaggttggaatctagaatgtaaggccctccacttcctaagcgttagtcaatgagctcagctttacagtggtatcgtgatggccatcagacacacctgagatggaatcctggttcagccaccacccagacaacacagctgtgtgacctggggggatttaatatttctgtaaaagggaaagaatatgccaccatccacatttggtactaggaggaaaaactgctctctatctatggggaataaaggagaaggagcagaaaggtagagtgggggaaagagcttagagaggccccccacccagcatgaatccagtgagtctgccatcctcctggtctacgagggccttgtctattcgtctttctctctgtcttttttttttttagttgtaataaaacatacatattatgyaagtgctttcccctttcagggcctcggtctccccatttaaaaagcaaacgggttggctaggtgaaatctgctgctgtgcctctattcaggagaagccggctgtaacattcaactagaggatttcctggacttctctcgagtgtgacttagcagcctagttttgtatttgcagggcatttaacaatcaatcatctcagaacaatatccaagtaagcattttatcagggaagttaaaggagaggcggacagagcacacggaacaccaccagcacagaccggggctggagcgcagccggccagcacgttcagagccctgaattccagccttgcctgccctggagcagccaatcacatgggcctggctgtatccagaagtctcattaagtctgttttatggctgtttttttgacaagtgaggcctttaaaacaggtttcctcattgtacagagagtgaagttcagtccaaacattgtctgcagaagaaactgggtggacccaaaagccagggggaccctaataaactctactcacactctggagccaaagaaagggatgcttcttcagacaccctgtaagtggctttgctaagaataataatgcaaaacaaagaatagaagccccaatctcccaacacctcctagctgtctataccttctatatctttaacctcacaaatctagtacaatattattgtcctggttttccgaaagaaaaactgtatttcccttcaaatccctacagctagacaggactaaaccagtattcaaattctagttcatctgatgtcaaaacagttctgtctattccaccagctgcctgccacagatggtgatcgcttggagtggattccttaacagcccagctttttaggaagagtctttgagagtctaaattaccacatttctccttggtcccccagaggaagaccagtctcatcttggaattgtgtgtggtttgggaagctgagttggagtcagattctccatccaggaggacagagcagctgcaggccctactggaagggaactcacgtcgtagcaatcacgcacccgatttgaaagccttgctggtgaagtttctcagggccaggtctggtgagatgggcctccttggccatcccggaaccctaggagagtcacaaccacccacttgttaagagaagatcaagggggaaagtcagaccctgagggcagaagggagaccaggccaatcaaggaaaatctacctcccacagcctcctggagagagatttctcaagctctcctgactgagtcaatgtctgttttagaaggcaaaagtcaagcttcttggctcaggacacacaagccccttttaggactggcctgtcctcgctgggacaggcatctcccacctactcctccccacctgcccacagccagtgcttggccacagggaaaggtgagcatcgtctacccgctcaggctcacctgtggccatactgtagmtgttctttccaggccagtccctccaggccagtccaactgtcacctccttggcaaggcctaagtcccctggttcctctgtctgcccagcgctgtgttcttaggcaaaccacttagccatttggtggctcagttcccatttttgtaacttagagatgataatagtacctttctcctaggtttgatgtgaagattctatgagatgaaataagttagcacttaagcaggacctggccagactcagtgattcatacatttaaccatcatcatcattctatctggcctggattccaaggatccaggagggaatttgctagcaggagctccacctgaacggctcagtactcaagcttccatgcagcaaaagcctccttggttgccccaacagaggggtttccaccctgcttggaaccccactggtctgtgtatgtgttaccttaaggcccctggcccctgcagagcaatagtctgtctacacactcttctcccattatactgagatagagatcgtttctgaaactgaatgctgactgcctcaataatgaaagaaagccaggtgtggtgaaccatgcctataatcccaacactttaggaggccaatgctagaggattgctcgagctcaggggtttaagatcagcctaggcaacttagtgagaaccctgtatctacaaaaaaaaaaaaaaaattgtaattagccgggcatggtggcacatgcctgtagtcctagctcctcagaaggctgaggcaggaagatcacttgagcccaggtggaggtcgaggctgcagtgagcagctctccaaaggatcctagggattggaggattggatattagtcagaacaaaccttggaaattctttattgaatattttctaaacttcttattccaagtcagcactcagaaaatggactccaacgttcaagaccagcatgggcaacatggtgaaaccctgactctactaaaagtacaaaaattatctgggtgtggtgaagtgtgtctgtagtcccagattcttggggggctgagtcaggaggatcgtcactgcattccagcctgcgtgacaaagtgagactccgtctcaaaaaaaaaaggactctagctgggcgcagtggctcacgcctgtaatcccagcactttgggaggccaaggcgggcgaccacaaggtcaggagttcaagaccagcctgaccaacatggtgaaaccccgtctctactaaaaatacaaaaattagctgggcgtggtggcacacacctgtaatcccagctactcaggaggctgaggcaggagaattgcttgaacccgggaggcagaggctgcagtgagctaagatcgcactactgcattccagcccgagtaacagagagagactccatctcaaaaaaaaaaaaaaaaaaaaaaaaaaaaaagactccaacactgttttagtctaagatatggactcccaggctatgtgttatgagcactctctgaatgttgaacgccttaagcaatcatcttagtcttcccaacaatccttaaggtagtgtttctcaaacttsagtgcacatcagaatcacttagaaggcttgttgaaacacagattgctggactccaccctcagagcttctgatttagtaggtatggggtggtactcaggcttccaggtgatgctgttactgctggtctgggaaccacacaccacactttragaactactgctagaaggaactattctctcattttacaaatgaaaaaactgaggctcagaaagattcagcaaattgcctacaatcatatgatgtagaagatagtattatgagctgacctaacagcatttctcaaatctctcttgctgctttccagaatagaagttggaaatgttcataattcttttccaacattccttgcagttagggatggctaggcaacattactccaatgaatatatccttcttcctgcctaagatgctgacagtgtgcttttctcccacaagagccacatactagagacatggagcagaagaacaaaatagccctggtcctcagttattggcagttgacccaaggattccaacactactgaataacttattgttatgtatgaaaaataagccactattggtttaagccactgttagtcaacctttctgttattatagctgatgtcattccaaataatacacataagtgatcaatattggggccagtattgacacctgaatctgtctaacctcatactcattctttacacaacccatactgtgactggaaatagaactcttggccatgaagtactcaacaatccctaaatctcttaacttccctctaatagtgttcctcaaatggaagtggcttgagtgcttaatctcaatcccaaacaaaggaattagatgtgtctygaatctaaccaatgtcctatgactgacccaagtacaaacatgcctttaggttcttactactcaaagtgtggttcacccaccagcagaatcacctgggagctggttagaaacacagaatcttcagccccatctcagtcccaccaaatcagaatctgtatgttaacaagttccccacgggcttcgtaggctcattaaagtttgagcagagttctaattcaatcagtggttcccaagactgactgagtgttagaatcgcctggaaatctaaagataaaatcaagagccctgggtctcactcctgacttactgaatcaaaactctacttgagtgggaacaagaaaccacgtcactagttatttacattatttcactcagggactatcttgagaaactgattaaagctatagcccttctttccgggaacatatacacgtacatgaattttgcttctaatttaagggattcacaggtcactgaagtccatccagagtcctcctaggacctcctaggacatgcgaactccagaaaagaaaagaagccctttcaacaagtctgggcagttacagaaatgcagtcaggatcctaatgagaagaggcagcccagcccctgccagctgggtaagctccggttagttctcacctgaagatggtttatgtaaccagctagaacccaaggtcacaattcaattagcagcttctgccacaagtttagctttgtgccccctgggatttccatcaccccagattacagagctattcatttcattttcaccaaattaacctaattcgcatggaggatgacttcctgctcaaccactgcccacaaggatgccacagaggcaggtgcctcattcaattaggagattttgaaaaatacatgcaaaacatgcttttcaaaacaaagtactcaacaagcaggggcagagtatcaccacctctcccaaccaactgggcagacctagtctccctcaatctacatatttctactgccacacttatttcagcattatatcatgtaattggatatctgttcttttaaaggctacaggcttctggagacaaatgaaagttttcatgaccatattactctacctagacctagtataggacctgctacaaagtaggcactgaaaagatgattgggttggtgggtgggtgggtggatggatggatgtggatggatggataggtgggtgaatgagtgaatggcctgatgggtggatggatggaaggaaagatggatggatggatggatggatggatggatggatggatggatggatggatggaaggatggatggatggatggatgggcagatggaaagatgaaggattatgctctttaaatatagtataataaaaaatatcggaagttcaagtctatgaaattcaggtgcaagttctaccatgcactcaaaagttgtgaggtctcagtcaaagcatttaacctccttgatgaaatttctctctgtgaaatggaggcactaacaacaatacctgaatttctaaggttattatgacaattgaattggagaatacatgggaatgccatattttaagcaggcctcagacaaggactatggaaagagatgcattccagaatctggcagagctgagctccaagtctggcttcatcactgtcagctgtttgaccttggacaaatatcataaactctctgcacttgcatcctcatttgagcaatggagatggcaataactcctccaacaaagaggctctgaaggaggcactaaaattacagagtgtgtcactttgccccttgcctcctgtggttggatggcttctgtaagtttgcagaacttccaagaagaggtggttgagtaagaaaaatggctgtttcaataaatctgatcaagctgggtagaaaagcatgaaccagcaaccggatctctgattagaggctggagagaaaagggtgtgctgggagaactctcatcatgtgggcctcacaatctatctaacataaagctttcatagccaagtttcacaatttcccaccacatgagcaaacttcatttgccttgatgaggcaataactgtgtgcatttatttatatatttcccttttcctcctctccccagcctcctcactaatccacttggcctttttctcaggccctgcttcaatctttctccttcatagcctcagaagcagtaaagttgtgtagggtttgggggctcaagtcctcggttcagataccaccttccacctcctgactgcatgacctccacttccatgggccttcgttccctctgcgtgggggttattcactccagcctgggggtgggggctgctgtcaggatcagtgtgctatctcacggatgatatggcaggtgcttgtggatcatagtttctctcttcctctgtgtggggagggaatccagccagaagctcaaaatggatttgttttgtttgttcaggaattagggaaagtgagaaactcccagacccaaaccagtcttgaactgaagtctgggagtagggaaagccctttactgcaaacacctgtagaaacatcctggtcttttacaagcctctggcgccttccgccagggttgtgagaccgattgagttggaagggccagcacctgtgcactcggtggcccagtggctctccattsctctctgcctggctttgccctgaacccccaggtcaattcaacccaaaccatgggtaaagcagagctctaacagagaacgatcagcggagatttgtgacagggctcttgaagsacagtgtggcaggctggccggccaggtgcccattcacaatgtgtgagtgccccacgctccagggcatgtcacaccatgcccagcctcacaagcactgggaccctgagagagtgtccagggtcttcttcagtcccatcagtccttctcaggatgaggagaggaggaggaactgctgagtggccctggacagcttgcttagaacctgtgtggtctgtgatacgacatgccatgctcttttgcaggcattttcattttacctttcccttacaaggtagaccctgttaggcccattttacagatgaagaaactgaggcccagggagatgtgaagtgttcragtgaacttagctggacaatagcagttccagttttctaatctgtgtctggcttcctatccaatggcctccctactccccaggagctaccagacactcagttcaatgatctgtaatttttcagtccttctccaagttttcagtgtcctgggcccagcttaaagggcaaacgggatgaagaacgaggtgccaagcaacagaatatgcytgctagcaggtgatttggggtttccttctgcatagtcatggggcaggaacacccagtctttgcccatggtagcagtggccagggctcctagaagtcatcccaaagcagaagacagcacatgagtagtccccatcaattcctgaaatacctttaagtcccaaagttcactagttgtcaatgacagagtctcacatctaggaaacacccatcacatagccagcttaggcaaaatgaatgcctttcaaaggctatagtactagcagagaaaaaaaacaaaaaaactgagcaaatgtggcttgggtctgtagccaaaatccaatgttaaataacaggctgggggtggggaaagaaaagaaataattcatcagtagaatgatacaggcagtccatgggtatcaccagaactgcattttctcaccatatagagtggttgtgtaatttcccccatttctctgtcaataaggggctagtgctatcggtgaaataatttacaacccaatgtgctccactgtaaatgggtgctatgtttactggctgtaaaaacacctctgaacacactgaccttcaacaggtgagcccttgagtttatagcactgaagaattgttttactgcctcagcacaggcaacaggcatgctggacacctgttgggggtgaagggtagggaatcaagccctctggggattcagggaaaggaatcctaagaacaagctgcccccagtgtgagccaaccagatcaaacaaacctccaggtgtctggtcagtgctgggtccatggtaagcatctgagtcttggatgaacccactaagcaagtccaggctagagactgaggcctgcagagcacttccggaattggagaaccctatggaaggccagtaggatggagtccaaggcagatcctgagggaactccaagcactgagctgggggaacctaaataaattggtcaatatgaggggcaggagcaagagaaagaccgaagataggaattacagccaaaggcccaatgttgaacgagtctagaacccaggcaaagcaagttttctgcaaataattcatgaaccaaagaagcagagcctctgcctttaatgacggccaccaaaaggtacgtgggtgaatagagcagacagaaaaggataggactggggtgaacaaaaatgttattctggccaggagcagtggctcgcgcctgtaatcccagcactctgggaggccgaggtgggcggatcgcctcaggtcaggagttcgagaccagcctggccaatatggcaaaaccccatctctactaaagctacaaaaattagccaggggtggtggtgcatggctataatcccagctactcctgaggcaggagaatcgtttgaacctgggaggcagaggttgcagtgagccgagatcataccactgcacttcagcctgggcaactgagcgagactctgtcttaaaaaaaaaaaaaaaaaaaaaaaaaaggttatttctttctcacccttcagcttgctctggaaaggtttttgtttttcccatccacgccttagtatggaggtttcagagaggcccccatggggagcacacttccccaaaagccaattaccaaaatggccagaaggataaatgtgccagcctcagcccrgcatatattctttgagtcttcaccagaaagctaaagtggcatttgacaaaacctctggagtgtttcaaactatgttatcaggcccaaatcctgatgacagacagaagagtataaaagaataaagatttcccagatgaaaagcacgcttggagggtcctgagcccttgcaggcagtgacgaaatcaagggctgcatgcagtttgttcacatgaagagccctggaagaaggcttcacactcagcaagcgccctggccaaatgaggaagagccaagcaggctggcctgaggttgctccataccctgggcctctggggagaaatcagaggaagcaaaccgttgtgtccacaccaaatgagaaacctagtgattttcattcccggtgtttttaattttgtgcctttgaagatcatcttaattttttaattaaaaaaaattacagttgatgacctgccagttcttcacacacacaattatcattgaaagccaagggtccccacctttttgcaaataaacaggcagaataatctgtgagaagacctcacggccaggcaaggtggctcatgcctgtaatcccagcactttgggaggccaaggcaggcagaccacataaggccaggagtttgagaccagcctgaccaacatggcaaaaccctgtctctactaaaaatacaaaaattagccatatgtgatagctcatgcccgtaatcccagcacttttggaggccaaggtggatggatcacttgaggccaggagcttgagacgagcctgggcaacatggtaagaccctatctctactaaaaatacaaaaattagcaggacatggcggcacacgcctgccaccccagctactccggaggctgaggtatgagaatcgcttgaacccaggaggtggaggttagccaagatcatgtcactgcactccagcctagacaacagagtgagactctgtcccccctgaaaaaaaaaaaaaaagccaacaggttgctggggttggggaggggtccttcattcctgtctctgctctccctactgcacacatgtacaggtgcaaacacacactcacacgcacacacaaatacacccctacaactccccaaacaagacttgttcaccaccataacccagcacctagcactggggcagggatagtgcagccactcagtgaatatttggcaaataaactgattaatatataaggatataagagagctagaaaccagacatgcaaggaagggagaggagaaagagtgacaaagtgggggtggcttgggatcccacccccagacggttcatccatctattggcaataacaagccctagcataacacccttcagattataaaatccagacgcwtctcacatcacttttgattcccaccactccccctactcccaggaggtaaggatctttgtgctaatgctaggaaaaaaactgaagcagaggaaaggtctactggtttgttcaaggtaggaaagaaaacaaagctaggaactaaaacttctgaagtcaaagcttgggctctgggccatgcacagtggttcacgtctataattccagcactttgggaggccgaagtgggcagatcgcctgaggccaggagttcaagaccagcctgggcaacatggtgaaaccccatctgtactaaaattacaaaaaattagctacttgggatgctgaggcaggagaatctcttgaatctggaagtgcctgttgcagtgagcagagatcgtgccactgtactccagcctgggcgacagagcaagactccatctgtgatggttaacgctgagtgtcaatttgattgaattgaaggatgcgaagtattggtcctgggtgtgtctgtgagggtgttgccaaaagagattaacatttgagtcagtgggctggggaaggcagacccacccttaatctgatgggtataatctaatcagctgccagtaaatctaaaggaggcagaaaaacatgaaaacgtgagactgactagcctcctagcctacatctttctcccttgctgaaygcttcctgccctcaaacatcagactccaatttcttcagttttgagactcggactacactccgtgctcctcaagtttgcagacaacctattgtgggaccttgtgatcatgtaagttaatgcttaatttatctatctatctatctatctatctatcbatctatctatctrtccccctaggaaaccctgactaatacactgtctcaacaacaacaagaacaaagcttaagctctggtggctcctggtctctgagtttgggaccctggtctaaacctatattatttaagcaagtgacttcatcacaacccaggaagactgaagacactaatgtccatctattcattccgttactttatacagatttactctacacatagcacctgttatgttccaggtgtctgaggagctagagaaaccacaaggaacaggacaggcacagttcctatcctctccaagcttacatactggtgagagaaacagagaccaaaggggcaaacaaagagacagacaaggtgatggaatagcaattaattggggatcatgagcagtggtgtatgcctgtagtcccagctactcgggaggatgaggtgggaggatcatttgagcccaggagttcaagaccagcctggccaataaaaagatcctgtttcttagaaagaaagaaattaattgaagtagtcccacctgaatggacagccagggaaagacagccaaggaagcttctgagaaaaagtcatttgagctaagagctgaagggtcattccaagagcgatccaagcagagagaaggaacatgtgccaagtgttggagacagatgggagttcagggcttccaggatgagaaaggaagccagtgtggctacagtgtaatgagtgagagaggagaatctctctgtagatacagaggtaaatgtaagtggagatgaagacagaggtggagatgatgatggagatcatcttgcatttgcctgcccagcattccacgtcttcttcttgcagtagaatgctattttcttttcatcctatgagatttggatggtattgacttccctctgcagtaccagaaatccatgcttggctaattgattactgcctccccccgcctctccatcatcccaaccaattcacgaacccactcccagcatgtcgctcaaccaggccaataaacaagacttcagccagacctgttggtaaagacgcaaactgaactgctagtgcccatcttaccacaacagggggacagcatgcataagagtaactcccagaggcaagcagagctgagaaagtcctgagctatagtttgaccctttggacccagatgtayccagacttttcagctatgtaagccattaaatgctattttttttaaatattttgagacagggttactatggggtttctcaaacttgcagctcatgcatgatgcacgcttacacagttatgctggctgctgagtggcaaattgattgaagaaggacaaaagtgaaaacagagaaacgcatcaggaggccacacaggagtcaggagagaagaattaaataatttcactaaacagaatccagatttttggagcaagtgattacactgaaacgtgtggctgtctgtatactgtacactgctcacagatcaagcccactccatatgttcaggtgcccattttgcacgtgagcactctctctcggcggatcactctgaatggccagttcattctcattctctgggtctcagctcaaatgaccctttctcagagtggctgccaggaaagctatccaagtggactctcccattattttctatcccatcactttgtttatcttttcacagcactatcacaatgcataattattttgattttgtttttgtttttgtgtatatttttgtttttgttttgagacagggtctcgctctgttgtctaggctggagtgcagtatcatgaacatggttcactgcagcctcgacttcatgggctcaagcagtcctcccacctcagcctcccaagtaggtgggaccacagatattcaccaccatgcccagctaattttttaatcttctgtagagacaggatctcactatgttgcccaggctggtcttgaactcctgggcttaagtgatcctcttgcctcagcctcccaaagtgctgggattacaggtgtaagcaactgcaccaggcccataattattttgtttgtttatttgcttatccctttggtctctgtctcccccagagcaatgaaagcttgaggagaactggggtcatgtttgtcccattcatagctgtgcctccagctactgagcatagcctggagcaaacaggtgctcaacaaatacatgttgactacattttaayttaataactcctctcctgacaatttactccgagaagtcaactcagaagaaattttcaaaacaccatagacatagatagtcgccataatctaaaatgttcaaaaaatagccgtctttaagtgagtgaataatggcatatccacaaggtagctactacagccagagaaaattataaagtattagaaaaatgtcccaatataggccaggtgtggtggctcatgcctgtaatcccagcactttgggaggcctaggcgggtggatcacaaggtcaggagttcaagaccagcctggtcaacatagtgaaaccccttctctactaaaaatacaaaaaattagctgggcatggtggtgggtgcctgtaattccagctactcaggaggccgaggcaggagaatcacttgaactcaggaggcagatgttgcggtgagccaagattgcaccattgcactccaacctgggcaacaaaagtgaaactccgtctcaaaaaaaaaagaaagaaaaagaaaagaaaaggaaaaacatggcaatatagaatagaaaataatgttaagtgataaaggaaggatataacatcatacagattgtacctatatttaaaaatgaacatatacctgtaatcaaaatctaaacacatgtggatcactacaggaagggagggtgtaaaaacaaacaggtgatgtggaagtcatatagatccagggttattttacttgtgctttttatttccttacaagttgattttacaataaacaggcaatgtggagttatgcaaaatgaccagattcagaatgaaaagctgcagaatgtttgggctgtaggaatcatgccaacctcctagagctgttgtaaagttacaatgggatcttggattcagaggtacacagctcagaactaggataaatgtttgatgcataaatttaataatcataatgacaattacaataaaaacataatgctaatcatcattacattataaggagtattataacgagatcaggagttcgagaccagcctggccaacatggcaaaaccctgtgactgcaaaaattagccaagggcagtggcgtgtgcctgtagtcccagctacttgggaagctgaggcaaagaatcgcttgaacccaggaggcagaggttgcagtgagctgagatagcaccaatgcactccagcctgggcgtcagagagagactgtctcaaaaaaatatcggggggacccagagaactctctcccaccctctcttcgccatgtgagaggctacaacagaaagttggtagtctgcaacctggaagaggaaccgtggcagaacctgaccatgctggcagcctgaccttggattttcagtccccaaagtgtgagaaatcratctctgttttctaagccacccagtccatagtaatttgctaatagcagcctgaactaagacagacactcagctccagtcacactgaactaactgttccccaagtcgtcatgacctctcatggctggtgagaagccccatctctgtgctctcttagcccctgtgtgtcttatttatagggacacttagatactgagttttctgggctgtcaatctgtcagtctctccccctagttcatgagtctcgcgaggactagtgtctgattcatttcaatgtcccttgtacctatcgctgaatctagttcaataaacctgggtttaattgaatggaaatataataaactgtttatgatgtggtagaagcaatacaagtaaaagctacaaagaagagaaggagcaattatcaagggtagagcctggactctacacttaccaagaatcctcactccatgcaatcaaccccagctctgaacaccagggaggagttcagctcctgccttccgcccccgtgrgggccctcgtgatgaatacatacacttcataccatctcacaacctacctgggtttcctcatctgagcttgaagaaaagaaaaatgaacactttgccaaaaccgccatcctycatccaccaaaagcccttctctcttgtgcctggttcaattattcttttctgaggggcaacatgcaggatgagaaaaaagggccaggtcctaagtggggctctcctctaagaagcaaaagcacgagtttcagagagatgaaaaagaagactgggccgggtgcagtggctcacgcctgtaatcctaggactttggaaggctgaggtgggcagatcacctgaggtcaagagttcaagaccagcctgaccaacatggtgaaaccctgtctctactaaaaaaaaataaaaataaaaaattagccaggcatggtagtgcatacctataatcccaactacttgggaggctgaggcaggagaatcgcctgaacccgggaggcggaggttgcagtgagttgagatcgtgccattgcactccagctgggcaacaayagcaaaactccatctcaaaaaaaaaaaaaaaaaaaaagaagaagacccatgttctgggacttactgctatcacagagatgctagtcattcgtttgttgtataaaaaacagacttatgccgggcatggtggctcacgcctgtaattccagcactttgggaggccgaggtgggtggatcacctgaggtcggaagctcaagaccagcctgaccaacatggagaaaccccgtctctactaaaaatacataattagctgggcgtgttggtgcatgcctgtaatcccagctactcgggaggctgaggcaggagaatcggttgaacctgggaggcggatgttgtggtgatccaagatcgcgccattacactccagcctgggtgacaaaagcaaaactccatctcaaaaaaaaattaattaattaattaattaaaaaaaaaacagacttattcccccatgtcacatgttcatttccctgaagacatcacaagctcaaagcctcccmggctcaaagtgttcagtgcttgatatgctatccctgtccacctgcaaaggcactgtcctgaagattagatgtatttgttctcttctacaatgctttagataagataaggacacaagagccagtgaatacacatcaggacctgcacagaagtatwgagaagtatcaccactgtcactagggtggatcataaagctgaaaaaaatgcccatttgaaaaccaataacccatgatctgagacccagatatttaatatgtggttactttctgcctccaatgtaaatatttattgtgttttagcatgtaaagaaaagctatggctattacacttcccaacgtgatgttcttgctgaccaacatgatggacacatttattgaaaccagcgccacacaaacctgggttttytaatgacaacagaaacaagtctctccttccctggcacatctcagatggattaaaaatcttgaagtgggccgggcacggtggctcatgcctgtaattccagcactttgggaggccaaagcaggtggatcacctgaggtcaggagttcgagaccagcctgcccaacatgatgaaaccccatctctactaaagatacaaaaaattagctgggcgtggtggcaggtgcctgtaatcccagttacttgggaggctgaggcaggagaatcgcttgaacccgggaggcagaggttgcaataagccgcaattgcgccactgcactccagcctaagcaacagagtgagactctgtctaaaaaaaaaaaaaaaaaaaaaaaaatcttgaagggacacataaatggtttccaagatattgagaatcctgtaagagagtttagcaggcagagccaccaaagtgtttgtcaattagatcatgatgttcccaaggcaagaccgcttctccaatgcattcccagtgccaggcacagtggttgacacatgagaagcactcaacaggttcaaacaaacaaatgaatgaagggcagaatggactggattatttcaaacatgatctctcagattcactgtgaaaacttagagcaaaatttagaaagcatatgcttttgtgtccctaaccccagtgttacccctgaacccactggccaaacactcacagttggaacatatatcaattaaggtgttttcaagagcaaagaataagccactcaacttaaagcgacttaaagaattaggaaatttaggccaggcatggtggctcacacttgcaatcccaccacttcgggaggctgaggtggggaatcactaaagtatagaagtttgagacagcctgagcaacattgcaagaccccagctctaaacacacacacacacacacacacagtgtttttatttttttaattagctgggtgtggtgacgtgtgcctgtagtcccagcaactcaggaagctaaggagggaggatcacttgagcctaggagtttgaggctgcagtgagctatgattgcaccactgcactctagcctgggtgacagagtaagatcctgtctcaaaaaagaagaaagaagaaagaagaagaattattaggaaatgtattacctcaaatagaacaactacagggatttcaggtgagttacagaagaggcacacacacactcacacacacacacacacacacacccctacacatccttacccattatagtaagtccccgttttaattattcaaaggtagagaatattattgaattcagaataacacgtcagtcagtcaggtgcagatcacagcacacatcttagtgaggcttctaatgagattcaaagggctatgtcactgctcttttttactcgttgctcatgtcactagaatagaatttactctaacatctatggcttctattcaagggaatgtttaaacacaacatgaatgagtccatttcctcaactgcagaaagaaagcagagtccatgcccaggaattctcaaacatcactctgccttcagcattgcacagtaccggcaaagccatttcctcacattttatttgaggattttgatacggagtgctagcacaatgattacaagttcattttgtccaatttatacaccataaaggccagaggtggagtgacttcagagctgattcaataacttcatctaggatccatgttttttccatgtctcaacatatcaactttgttcttagactggctcccctcatggtcccaagagggctgccacagttctagacctcacatctggaytgaaaaacatccagaggcagaaaaagmctgaatcttctagtggtaagagtagaagaaaccttttccaggtgcctcccatcagctccctgctttaatttttttttttttttgaaatggagttttagcttgtcaccagcctggagtgcggtggcacaatctcagctcactgcaatctccacctcctgggttcaagtgattctcctgcctcagcctcctgagtaactgggattacaggcgcatgccaccatacccagctaattttcgtatttttagtagagacagggtttcgccatgttggtcaggctggtctcgaactcctgacctcgtgatctgcccacctgggcctcccaaagtgctaggattacaggtgtgagccaccgcacccgggcttttttttttgtttttaatcagccaggtgtggtgccgtgtgcctgtagtcccagcgactcaggaggctgaggaaggaggatcacttgagcctaggagtttgactttaagtctcaggccgtactgagagacacacccaccccaaaattcattactgataagggaacatgggattgcagttactggttaaactaatcaagattcacccctgagctggagacagagacaccttccatgactaaaccagggctctgtcagctgggaagaatgccctaagcaaaggacaggcaccgaacagcatctgtgcccaatagcccgagccccatcagcagggaccttttgggactctgtggctgtgtgggctccaggggtcccttgaggtagagacactattaaagagaagggattcagcacttagctcacccatagtgtttgattctggctcctcttggggcaacagcaaastatgggggctatgctgacatcaygatctatgatgctgccgccaccatggtttattagcctgcctgtgccacttcctgagcctccaaatcacacagaatgtaagacagacaaaaatgtcatcagagtacaagagcaaagcaagctgctttactgggtacctactagacacaagacatggtttttcacattaratcatttaattctcacaatagccaccagctaggtattatcagcactctgttaatagaaaagagggcagtggcycaagcctgtgatcccagcactttgggaggcctaggtgggttgatcacttgagctcaggagttggagaccagcytgagcaacaaagtgaaaccccatctctaaaaaaatttttaaattacccaggtgtggcggtacacatctgtagtcccagctactcaggaggctgaggtaggaggatggcttgagcccaggaggtggaggttgcagtgagccaagttatcatgactgcactccagcctgggtgatagagccagaccctgtctcaaaaaaataaattaattaagttaaattaaattaatgcagaagttgagggacaatcaaacaatttgtccaacatctcatcactagaaagtatcagagcccaaattctagctccaaccctgactctaaaacctgcagcctttgtatgcrgacatactgtgttccagtgcagaatagaatgccaagtcacaagcaaagagaaaaggacataccagaaaacattgtcagcccaagaatataaccagagaagacaaagaaagagttacaaacattcaggaaacatgagatcggcattacattatgatcccataaacacggttcacatatgcaagttacatataaagcacaccctcagtcccaaagccctaccccataagttgccttgattggatttcrtaagactactaaggcagtgtcgctcgaatctggtccatggactgatgctagtctgcgaactacgcgtttccagttcacaataataaacacagaattgaaagcaacatgttagaaacctctctagtgttttaacagtgcaataacattcaagcatgtgactagcagacttgtcttctggaatggggtctagactagtttgggtgytgttgaactcaggttgcatatggcccaagctgcatgcttgtactggttcatcacggattgaaaaataaaaaattaaaataaataggccgggtgtggtggctcaagcttgtaatcccagcactttgggagacccaggcaggtggatcactttaggtcagcagttcaagacgagcctggtcaacatggtgaaaccccgtctctactaaaaatacaaaaattagctaggtgtggtggcgtgcacctatagtcccagctactcgggaggctgagggaggagaatcacttgaacctgggaggtggaggttgcagtgagccaagatcacatcactgtactccagcctgggtgacagagcaagaccctgtctcaaaaaaaaaaaaaaaaaaaaaaaaaaaaaagataaataaatgaattaaaaaaaaaaaatccctggtggttccccagagaaagttggaaaagcaccaccctagaattcagctgggtaaatataattaccctcatttacaagtaaagaaaatgagattcaaggagactgagtcacttttccaaggtcaacacccctgggaagaggcaggacaggaaaacactctagttcaatgacaaatgagaactatgaaatctcccagctcctgataacagaaagtgctggcaagaggggcctgtaaaaaggtggaggcttgtttaaaaaaaaaaaaaaaaaaagcatttccctcagctttgccattgccaaaagttcagccaagataaaatgcctctgatgagaactacctataaagtgaggccaggaataaaagggaaatggatgggctcattcctggcaaagccctgtcttgtgcatcctgatttactagtgttacttgtagaactgacttgttgttactacaatttcaccataaattacgaagacgaaggtgtcttctcaaagcccttccagtctggctccagattttaccagccccatcactgactctaggcccagccaaactgaacctcccaccctctcagagctaacgttggttattttagaatgttccactatcacctctctcttcttcttactcaactagaaaagccctgctctccatgaaaacatttttggaatattgttatagctaagaccctgggtttcaaraaccaaggctcatttaagctcatttttaaaggacggggaatgtatgtggggctrttcagtggtctcatgcagacattccaggacaggaagggccacagtggggactgagaaacattgtcacccccggcagctcctaatgttttttctgtttctgaagtcactggactctctagccctcgctacatctctgctttctccctaggcgtctcctgtttccttgttgctttagtgtccctacaccttcactggtagacaatcattgtggcttcccaattctaccttgcatatttgcaaatgcagcaccagcaccaactagatccatccctctcttcccaagtctaacttcccgaagaaggaatctgattggctgagctcaacttttcaagtcaggccactaatcaatgatctccagcctatctaagaattagcttacttggggcctgaggtcaatctctggtctcaacagctattgtcaggaaaggccaggtatgtgacatggagaatgtctgcttaaatgcaggagactggaagcaggtgggtctagaccactgatatggtctttaaaggaattaaagagaaattaataaactcctatttttgcttcagttcccaactctcgtgacactttctctaggaggtcttccatgatttcttcaggttagtttttgtttttgttttctttttttgagacagagtcttgctctgtcacccaggctggagtacagtggcacaatcttggctcactgcaacctctgcctcccgggttccagcaattctcctgcctcagccttccaagtagctggaactacagacaggcaccaccatggccagctaatttttttgtatttttagtagagatggggtttcgccatgttggccaggctggtctcaaactcctgacctcaagtgatccacctgcctcggcctcctaaagtgctggtatcacagatgtgagccactgtgcctggcctatcttcaggttgatttttgttccttatgttcttgcaacacagtgtaagtccctctctaggagctctcatcatgttaattagaaactgcttgyttgcatctcttctttccccactagattatgagggctttgaagatctggaccacaccacgaccacctttgaatccacagcatggagcttggtgttgaacatagaaggagaacaggaaatgagcatggaatgaatgactgaatttacaaccggataagtcagcacctgaataaaaggctgacgagtgaattatgctgaaacaaatgtaggtccctctgcatccactccagatcaactaaggagaatgacaggggtagagtgggtgggagggaaggggcaatggaraggtaggaagattctttacaagaacaagtaaagtgaaagaaaaatcaccccaaaaggaagagacaaagaagtagttgaacttctttgtggcagcatcttttacttccagatgtttctttaggtatttctgcattccttggtctagcaggggaatgaaagattaaagcttggattcatcttccacaactgtaaaatggagataggtccagctgcttggctgggtgactgggagaataaaaaatgagataatagatgaaaagtacccwgcagagcacctgggggcaggtaaaaaaggctcatacactgtgggtcacagtggagagtttcagaaatgcccagaacctaccaagcaacctctcaatggcaggaggaagtatgtcctgggactttcacagggaagcactgaatctttattaaattacccttccccctggggtttagagcaagaggcagcagggctgttcctgcctcactgatggcaagaggcctgcgcaggccaataacacggttacagtgttaatcattaaaatgctgtgtctgtttttgtctggggacgaggcatttcgatctttgttctccctctataaagaggaaaggtgaggtgctaagtggtgactccaagccaagaggctagcatgcctgccaggccacacggatgggaaggcttcagattcccccagccccagcatttttggagatgtccttggagggtaaatcctgagtagacgcagttggaataggaggaaaggcagattagctcctcccagaaagccaggctgtgcccattcaaatgagaggcttctatcattggctgtcaaaagagagttaagaagcaaggtggtaggctgggcgcagtgactcatacctgtaatcccagcactttgagtggaggaggcgggcagatcacctgaggttaggagtttgaggccagcctgaccaacatggcaaaacccygactctactaaaaaatacaaaaattagccaggtgtggtggtacacacctgtaatcccagctactcaggagggtgaggcaggagaattgcttgaacccgggaggcagaggttgcagtgagctgagatcacgccactgcactccagtctgggtgacagagcaagaatctgtctcaaaaaataaataaataaataaataaaagmagcagcaggrtgaagggatatacccaacagaaatgcaaacacatgtccacacaaacacatgtatgcgaatgttcatagtagcattatccacaattgccgaaaaatggaaagaacccacatccccatcaactgatgggcatataataggattccatttaatgtgaaaggtccagaacaggcaaatccatacagacagaaagtagatcaaggttgccagggactgggggagaaggggaataaggagtgactgctgatgaatgcaaggttttcttttggggtgacgaaaatgtacaactttgtgaatacactaaaaaaccatttaattatacactgttaggtgaattctgtggtcagtgaattatatcttttcttttctcttttttttttttttgaggagttttgctcttgttgcccaggctggagtgcaatggcacgatcttggctcactgcaacctctgcctcctgggttcaagcaatcctcctgcctcagcctcctgagtagctgggattacaggcatgcgccaccacgcccagctaattttgtgattttagtagagatggggtttcaccatgttggccaggctggtctcgaactctcgacatcaggtaatccacccacctcggcctcccaaagtgctggcattacaggcatgagccaccgcacccggccagtaaattatatctttaataaacctggactctgagtcagattctttgctcttatttttttttattaaggaaatattaaatacctactaagggccaagcattgttttaggtgctggggccataggatgaacaaggcagacaatgccttgctctcttgtcatttacatttcattgtggaaatctgtccgccacgcaccccccaagcttaaaggcaaataaataaataattgcatgtgtggtgaaactgtgaagcaaacgtagagcttaaagaaagaaytttttagaatgtagcagtatgcccagaatgggagaaattccaggcagagaccagcatgtgctcagggcatgggtgaaaaaggtcttgggstgttaaagacactgaaatcagaccaggaggactgaaacagtcactccaccacttctttgtgtgtgaccttatacaaggccctgcagctccctgagttattctgcggggtagtggggagacagtacctatccaatcagggaagcacctggctctgtgctggacatagagcaggtacccaaatatcattcctcgccctctccatctatcccctcctgacatgctggctgcagtctattcctccatcctggattgcatattcttcctctctctctctaaaaggacagacatcccctaaaagagtctacaaaaatagcaaatgtgcaggctaggtgcagtgtctcacayctgtaatcccagtactttgggaggccaaggtgggcagatcacttgagctcaggagttcaaaaccagcctggacaaaatggcaaaaccccatctctccaaaaaatgcaaaaaattagctgggcatggtggcatgcacctgtcatctcactactcaggaggctgaggtgggaggattgcttgagcccaggaggttgaggttgcaatgagctgagatcacaccactgcactccagcctgggtgacaaaataataataataataataataataataataataataataataataataatagaaaacgtgaccgggcacggtggctcacgcccgtaatcccagcacttagggagtctgaggtgggcggatcacttgaggtcaggagttcgagaccagtctgaccaatgtggtgaaaccccgtctctaccaaaactgcaaaaatcagccaagcatggtggcaggcgcctgtaatcccagctattcaggaggccgaggcaggagaatcacttgaacctgggagtcggaggttgcagtgagctgagatctcgccactatactccagcctgggtgacaatgttagactccatctcaaaaaaaaaaaaaaaaagagcaaatgtgccacataattctctcatcagtggtacaagccagacacattatccctgaatgcctgcactgcatggaycagaagaattagcctgtgatggtctgtgaactgttttccttgatcaagtgtgagtcattaggtctgtgctaggtccttattgagaagtagctccataagagcggctactgttgccttccacctataaaggtggcctttcagcagcctctgggctctgtctagaactaatttgattaggaaagctcagctaaggaggaaaacacaatactgttgatcagggcataagctttagagtcaagcctatctggattccaggctgcagacttacttctacttcttcctggctaagtaccctagatgtaggacttctccttttttttttttttttttaagagggagtctttctcctgtcccacaggctggagtgcaatggcgtgatctcagctcactgcaacctccacctcccaggttcaagtgattctccttcctcagcctcccaagtagctgggattacaggggtgcaccaccacacccagctaatttctgtatttttagtagatagatacggggttttaccatgttggccaggctggtctcaaactcctgaccttaggtggtccacctgcctcggtgtccaaaagtgctaggattacaggtgtgagccactgcgcctggttgggacttctcctttctgatcatttttcaccagcagcatcagcctcctgctaccatttatggggaatcattaaatagctaatggaattcccactatcacctgtgaaatttggctgctattcccatttaacagaaaagtaaacagaggcacagatcttagacgtcaagtacccatggtcatacagttagttgatggaagagcctggatttgaatccaaggagtatagctccagagcccgtggtctttaacaaccgcacactatgatgtccctcagctgcaaaatgggacaataacattggcattgtggagttttcacaaggaccgactgagctgaagtatatgaagtattttgagatgctgggaacctagagattatccaacaagtggtactggcctgtctcccttaaacttaaggcgtttcaaagggactctgctattagaagtgactttttcagacacaaaggtagggtttgcccaaggagagattgacaatgctgagccactgccctgtggagctctccagcaatcaccaaagctcccatcttaacccaggatcctccacaaagatcagacccaggagaggtgattcaagcttttaggggaacctgctggtgtcagctgctaatatatgtaaagtgtctagtacaaggtctggcacatatcttgattaaaaattaatagagctctatttgattgcactaaattctatacacacatttgatattcccattgaatcctcacagctgttctatcgcgtacatactattactactcccattttgcagatgaaaaaactgagacctaaagagttacatgatggtatgttcaacgtcatgcagctggtgagttgtcaagcaaggatttgaacccaggcaatgcgatctctgagcctccatcggaattggctccattctcagagactttctcctgccccttctcaggagaccacattatcagcccaacaccaattcatgtttacatgggccattcttgttaactgagacagtagagaggaatggctgagttgatgcatgggctttaggcagcatcagctcctccttcatagaagtgatataaccatatctcatttaatcctttcaatagccctatgagagacttaatatattaacttcacccagaccagaaaacagaggcaggcagataaagtgtacccaaagttacactgcaaggcagtaagaggagaaatgaaagcccacttcagctcaggctgggctccagggaaatagttgctagataataagttatctcacctctgagaggccaggcagccttgtgtctacacaggaaaacaaaggtagataaatgcaggaattcacagccctataaaaaacgaattaagataaaatgcgtacccttactacwtaatgagggaggtttatgaacacaaatgcatgacaatgactcagaggaacataattatcttatcgtaagttaaaggcaatcaattttcatttctaagtaaatatcatatttcctccatcctaacacacctatttttttttttttctcacatttggccatttctgaagtctggttacaacttaccacagatgctcatggtgacaatgcatcttccttccccgtcccgtaaaggcgagtattgaattaaaaatgtgacctacaaccaatgttgccttagaattgaggttcccctttcaatctcacccctgtcctagctaaggcattctatcactacccctgtcttcttttttctatttcaagtcacargaagaaaactatgcatttcttgttagaaactaaaaggaaactctctcacctgcagtagatgttacaggagcagactcacagaagaattaaatgattggaaaatagaaaataaagattttctcttccccagcctgtaactackcctgtaccctgatccctaatgcaagaacacgggaataagcctgggcaatatcgtgagacctcgtctctacaaaaaatttttacaaattacccagatgtggtggtgtgtgctggtagtcccagctactctagtggatgaggtgggaggatcatttaagcccagcaaatcaaggctgcagtgagccgtgaccacgctgctacatcgcactccagcctgggcaacagagcragaccctgtctcaaggaaaaaaaaaaaaacatgagaatggttgactgagcctgagcctggatctgcctggagacgtgtggtcagtggaaggggtgtctttatgcagctgggacaggtgagtccagacaggaagaaccacactccagaccatgcagtgactttgtggcagagccgcaaactcaaggctctgcgttcccagaacaagtgcttctcactgtgctgcttctagtttgttgcctcaaactctctgctcagaaggccctctcaaacctgggcaacacagtgagatcctgtctctacaaaaaaaaaattaaaaattagctgggcacagtggtgcacagctgtggtcccagctactcgggaggctgaggtaggaggatcacttgagcctgggaagtaaaggctgcagtgagctgttatcgtaccactgcacttcagcctgggagacagagtaagactctgtctcaaaaagaaggagccttcagcttgccagatgagaagtgatacagtgatactgtcttcctggaagcagaaaagttctgtgtccctgagcaagtcacttcatctcctctcctgctgctaaaactccctcatcctcacccttcctcatgctccttcacagaacaggcaacaacctccgtccagggcccctatctacatgtgggacttccacccatcatgggttgctggggccttcttctctctcctgaagttttgaaaakagagataatgcagtcataaaaagaaatgaactaatggcattcgcagcaacctggatggaactggagactattattccaagtgaagtaactcaggaaatggaaaaaacttcgtatgttctcactcatatgtgggagctaagctatgaagatgcaaaggcataagaatgatacaatggactttggggacttggagaaaagggtggggtgggggtgagggataaaagactacaaattgggtttagtgtatactactcagtgatgagtgtaccactaaaggatgactcttgtaatcaaataccacctgtttcccaaacacctatggaaataaaaaataaaattaaaaattaaaatwaaaaaaaatagagacaaaatgtaaaaggaagaaaggagtcaaagaaatcaccaagtcaagagtgctgggtctgggccttaaaccttacccttcctctctgtgaaatgggcacagcctcttcctctctgatctggtttcccagttcccttccasactggcctctggtgcttgcaggtgctaaagctaagacacgcatccctcttgctcctgacagcctagcctgggttggggggatcctgccagcaacaccaccggctgtaagttctgtggcagcagcctctaccctgtcatgttagtgtctgctgaattgaatcactcagaggtcattttctggcctccttttaaatggcagaccccaaaaacaaacgctgcttcagtttatgcctcttaaaactttggcctaaggtgctttgctcccattcctgggtacagaactagaaaatggagccagatcccagcccttgatgtgtggacaggatgtgggaaggtaacaaagggagaaaaggggtgaatgaaacgcccaagatggcttaagaagcagtctcatctggccaggcacggtggctcatgcctgtgatcccaacactttgggaggyctaggtgggtggatcacctgaggtcaggagctccagaccagcctggccaacatggcgaaaccccgtctctactaaaaatacaaaaattagccaggtgtggtggcrggcacctgtaaccctagctactcaggaggctgaggtgggagaatcacttgaacccgggaggtggaggttgcagcgagctgagttcgcgacactacactcccacctgggcggcaagagcgaaactctgtcccccaaaaaaaaaaaacgaatcagtctcatcagtgcaaatgctcgcagctcccaaattagttgggagcaactggacccaagaaacattcagcaagcacacgcatcttgaggttgtgaagaactgtttaagagtcagactgctggacgcagtggctcacacctgtaatctcagcactctggaaggccaagactggtagattgcttcagcccaagagttagagaacagcccaagagttggagaccagcctgggcaacawagtgaaaccctgtctctataaaaagtacaaaaattagccaggtgtggtggcagacacctgtggttccagctacttagggggctgaggtaggaggatcacctgagcccagggaggtcgaggctgcagtgagccatgattgtgccattacactgcactccaggctgggcaacagagagtgaccttgtctcaaaaaacaaaaacaagccagtcttctagattcatgaccccagctctgccacctacaagctacctgaccttgggccatgacttaacctccctgtaacatgggagtaaatagtcctttcctcctagggttgaggaatgcttggaacagtgcctagtacacagctaattctacagtattgttcactactattacctgcctggagctttaatgcactataatctcatagaatcttcctaacaagcctgggaaaaagtaattattttatagatgaaaaacctgaggctcaagtcatactgctgatttgcagcagggctgggatttaaagactccccggtctttccaacttcaagttccactgtcccgtgttccctcccagagagaggggatagaaaaggacaacaccgtgggggaggggaggtaaatcatgtggaaggggcatggatgccattgggaaaggctcaaagtgggagaggctgcccggtggggaggtctgatggagacagtttttccccatgacctcttgaagtgccacttcccagaaaagatgatggctgcaggctgagggcacactggggactccacatctttcatagccattgctgaagtctctgagcctcaagagaaatttactgcagaccacacatcggcagccatgagagggaaggcggaagggcaggccagatgggacagtccccaggcaggactctgcacaggctctggggctgtggggctctgggctgaccacagcctggaagagcctagtgacaccctgtcacccctagactcctcagttcccagacaccttgttctgatgaagtgaatggggaggctgggcctgggggtgggagaatagccacatgatagcccctcacccctgcatgccagcaggcagcagrgaaggcagacaggagcccagagggccagcagcagtgaccacggggcctacatttttctggcaacgagggttggcaagggagaacagacagaagcctgctatatcaggctggaaagagaaggactctcctcagcttggagaaattcctgcctagtaccatttgcccattcccagactaaccaaatgttagagcagaaaaaggggctttctgaggtcagccaacagggcctccttactttgcaatggaaaaaaattaggtcacacaaagttgaaagctattgtaaaggagaccagaacttgggtgcctcaatacctagtcccatggtcttcagggcatgcatatgagatccagaatcaggtcaccatggctctgactctggatctgcccccagccatcaatctgcactattctagaagcttccttcaggttgtaggttctatagctctgagatagagtggcatgcactgtgtgtgcacgtgtgtatgtagtatgcgtccattcaacagcaaatatttatcgagtgctccatttaaggccctggagataaagcagttcacaaatagaggaagcctctccactgtgtctctagggctgactttcactacagagagagcctcatgcacaatttgtgcctagactcaaaggtaggatgtgtcctgtgcacaccatcaagagctacagcccttctccgggtctccttgtgcttcacaggggttttggacaaaccttatgggagcatttccccagccccaacccatgccctgactcccgcctcccatggcaccccagggtgctgcttcgggcatttggtgccccgccttgcaatcactgacttcctgagcaacctgaagagggactgtacctacttcacctcttaatccttagcacctggtggatgcaagctccctaggaactcccgttgaataaagggatgattaaatgaaggcaccgattctcagyttctctcatctgtaaaatgcaggtgataactatctggatgactcctgattttcctccagatcagatgagacataggagatgaaaggaccttggaactaacgtgctgttcttcccaagatacagttcttattatcccccataaaaatggcaccagctcagtgtctctgagaaaggactcagctatagagagcctcggtttttatccgggagtgtgtgcttgagcatgaatatgtgtgtgagtgtgagtgtatatgctggcctggagagccaaatcgaccccataagaagatgtaatttcaaggaggcttcagggaacccagacctcctccctgtctgtccctatttacagggacatatggctgccaggccagcagagccccagaggagttcagccctcagccgaggacaaagggaaggacgggaaagagaaagcacccccaagagcccttgtctctccatcgtccgtccgtctgtcagcggcagccagtggcttgccaggcaggacggaagcgctgcccggccataaatgaccgctggctccaggctggccacccgccctggccgcccgcacggaagggccggactttacccagcaaatcgggaaggaactgaagcctctgaacttgggacttgggctccgtcgataagrccagtggacaaacagagggcagggaccagggctcccctttatacacacagaagcccggctccaggctgatactgctgagatctttgccctttagttcaaacaggaaatcttaaaatggaaaatgagctgcgtaaggaaggggcgcggccactagcttacagggaagacggagcaggttgttcgccaaagaacgttttggctccacgcggcctggggtgtttgggaggggtcaagggtctgcctggggaagggagaaggcagcctggcaggtgaggaagccctataggcagctgtagggcggggggagtgtcagaaacctgggtctgagccacaatacgcaactgatccgtggtgtggcttgtggggaatgacttcacatataggaacctcaatttctccatccataaatgtggctagccataccatccacctagagcgctcacagaggatctgaatgaagtcatggtgtgaaagtgccatgcaagtcacaaccctacatcctggcaaggccctccccagaaggaatttcacaatcacaaggggaaatccagaataacatctccagccccccatgccacccctgtacacccccgtgctggcagttcaaagaagagaaaattgggagaagagaaataattagagaacgccagcagtctctctgctgaggtttccaagtaattattcacctgtaaattactcctctcaccttaattctatctccagatcctttagacaaggtaaattcatttatttacatctctaactatcctgctttggtaaacattccaacaaggttggatggcccattaaagaaaaaaacaagtgaagaagcgaggcaagcaggagagagagagattaactactggtcattactggcatttgcagaattacctccaagggtaattaatgaggaatcatgccaaagcaaacctcaacttgagccaaaaaggaacccatcacagccaggtggaaactacaggcggccccacttgcagatggccctcgcttctcacctgcaggatgggacccttccaggaggctccccttaactccttctgcctcaggcagtggtgtgggctgcaccttcatttcaggaagaactctccttatctggtgaggtcacttttgactcacccctctcactcacagaccagcaatctttctgggccaccccccaacccaggcctggccatttctgggcctggcacatcttagctgctcaataaacagatggctaggcatggcggcttatacctgtaatcccaacactttgggaggccaaggcaggagaatcacttgaagccaggagttcaagaccagcctgggcaacatagacagaacccatctctataaaaatttttagtagtgacacgcactgtattcccagctacttgggaggctgaggcaggaggatcacttgcacccaggaaattgaggttatagtgaaccataattgtaccactgcactccagcctggatgacagagcaagatcctgcctctaaacagacagatagtagctgctgagtgaatggatcaatgtactattcattctaatttcctaaagcctcttgaacttgccaaatttcaaagtcaccccccctcccaagattaaactcaccatccttttttgcctgaaccagagcctccaaagggcctctccgcttctagtctctcctcctttcctcctccacacagatttaactctcaaaaaggtaaactgaaaaatcaagcaagataatacttcagctccgaccactgaggagaagggcggggttaagagagtggcccctagagtcagatagcctgggttgaagtctgggtcaacaacagaccacctgtgtatactttgggtcagttacttaacatcgccgaacttagtcttctcatggcttcttcaccttaaaatgagaataacatctatcccacttacaatggctgttgagtgcattatgagttaatgaagaaatgccttgcacctgatgaacactggctgttagcagcagcagggaaattagtctcatcagcatcgtccttactagaaatgccttcactgccttctcattgtcctcacattaaagcccaagcactttagcatgtcaagacacatggagttcacaaggacaagagcctgattcctgtcctggtccagagtccagctcagagagccctcaatagatatcacgaatggataaataaataaatgaaaccaggccctgctctctctcagcctcaattctcaccactttcccaccctccctagtccagccatagaagcccttgcagtttcccaaatgctacgtgctctctcaacctcagctctttgcacaggctgctttctctaagaatgcccttccaggaatccaggcactgcatcccaggacccaggcattcacagacgacaaatgcagagaggcgaccttaaatgggctcgtctctcagaggtgtatcccattttggacagtgagtgagccagagggttggacctttcaactggccttttaaagttcatgtgtcttctagaaagagctttctagtggctttgaaatatccaacaaccccatgaaaggggaagatagatatgggtctccccagctttaaaatgaaagaattgtggtccataaaaggccagtgacttgcccgtggtcaccacttagtatcagcagtgacataaccttaaactttccaagaccacagaataggggaaagaacacagactcagaagcaggtgtgagtttgcaaccctggccaagactttgagcaaagttcacctctttaagcttctaatttctccatctgtaaagcaggggtaagcataactttcctgcaaggtggtttgggaagatgtgttgagacacctaccacatgagaaagcacccagccactgcctggtcctagaggcagagtcactgcatgaaatgtgagtgaaggtttggagaggagagggaggctgaacagtggcaggtgtgcaaggatctggaagtggcaatgaaaagcaggagaaggcagcctctgcctccacatctggagtcaggaattttttaaaaccttaactctcaaaggccaagggcaaacggtatcctcagcagagagtcgagggtcagttaagataagaaatagaggcaaaattagggctagagacgcagctcacaggcagccagcagccagcattcgactcacacacactctgcccaactgggataaacttctgagaaccaagcccctttaaagttgcctctctgggtttgtcgtctgtgaatgcctgggtcctgggatgcagtgcctggattcctagaagggcattcttagcagagaaagcagcctgtgcaaagagctgtggtcgagagagcayggagcatttgggaacttgcaagagcttctgtggctggactagggagggtgggaaagtggtgagaattgaggccgagagaaagcagggcctggtttccatgagtcatgctaaggtgcttggcctttaatttgaggacaatgagaaggcagtgaaggcatttgtagtaaggacgatggtgtgagagtaattgcactgctgctgattaacagccagtgttcatcaggtgcgaggcatttcttcattagctcatgagaaaaccacagtgatgggatcaggtgaacttttccaaaaaagagttggagatggaaaccagagcggtagctaggaccaggaggtagggagagagacttggaagaggcagaggccaaaaatatgcaacaatgaccagcaataatagaaatgtcaccacaacaatcagagagtgaaattagctcctggtcattactggcatttgcaacttctatttattcaacagtttcctccacatgactgctaggagattctttttgtatctcactaaaagagtaaataatcggccggacacagtggctcatgcctgtaattccagcattttgggaggctgaggcaggtggatcacctgaggttaggggttcgagactagcctggccaacatagtgaaaccgtatctactaaaaatacaaaatcagccaggtgtggtggcacatgcctgtaatctcagctacttgggaggctgaggcagaagaatcacttgaacctgggaggcggaggttgcagtgagctgagatcacgccattgcactccagcctggacaacaagagtgaaactctgtcacaaaaaaaagaataaataaataaataaataatctcataatgctaagaagcaggtcaagacacatgaagttcacaaggataaatgcctgattcctgtcctggtccagagtccagctcagggagccctcaatagatatcatgaatggataaataaataaataaataaagagctagcactaatatcacaagagcaaatccccagacagcccttaaattcatatttaccaataatcccagattcttttatcttattttccaaatgactgattaagcagttacataagtaaaaaaaactgcttgagttaaatcaacctgaattaacacctgccttctctatttgcccctcttggcctcagtttcctcatttgtttaataaatattattgtgtatttgggaattcttgaggagtcaggataatgtatatatagtgtcatccatatggttttccgtgaacacatgaaatcttgtctaccagtctataaagcaaatccagcaaaattcagaaacattgcatatatgcagtgtttaaccacagagcaattcagctggaaataaataacaaaaagataacaaagagaaccttatgcttttgaaaatttatgagcttatagctaaataagtcaaaaatcaaagaagcaatgaaagtggaaattataacatatctagaactgaatgtcagtgaaaatactgtacgtcaaaatgtatggaacacaactaaatcaacaccggagagggaaatctgtaactgtaaatgcttagatggccaggtgcagcrgctcacacctgtaatcccagcactctgggaggccaaaatgggcagatttcttgagcccaggagttcaaaaccagcccaggcaacatggtaagacccccgtctctgcaaaaaataaaaaaattagcaggatgtggtggctcatgactgtagtcccagacacttgggaggctgaagcaggaagaccacatgagcctaggaggttgaggcttcaagtgagccatgtttgtgccactgcagtttagcctgggtgacagagcaagacctggtcttaatcaatcaatcaagcaaaaacaaacaaacaaacaaacaaaaaaacttagattagaaaaacaagaaatgctgaaatgtaataaactaaacatccaacttaaggaattagaaaataaccacaggataggaccgggcacagtggctcacgcctgtaatcccatcactttgggaagctgaggtgggtggatcacctgaggtcggaagtttgagaccagccgggccaacatggtgaaacaccgtctctactaaaaatacaaaaaaattagcccagtgtggcaatgcgcacctgtaatctcagctattccagaggctgaggcaggagactcacttgaacccaggaggcagaggttgcagtgagccgagataacaccactgcactccagcctgggtgacagagtgagagactctgtgtcaaaaaaaaaaaagaaaataaccacaggataaacccaaggaaagtagacataagaaaataagaaaatgagaacggaaattggtaaaatagaaaacaaaaataaaatagagagctttaatgaagttggttctttatgaagtctaataaaattgataaattttaggtgagaatgatcaataagaaaattatgtgaggctcaaaaaataacattacaaataataaaaggaatgaacaattacagatagagcaaagatttaaaagataataaaacatactatgaatgactttatgccaataaattttaaaacttagataaaatggaaaaattcctagaaaagaattctaccagaactgactaaaaaataattagaaaacttgagtcttcctttaaccattaaagtaattaaatctatcaaaaaaaatattgtatatcaacttttttttaatagatagagacagaatctcgccatgttgcccaggctggtctcaaactcgtgtgctcaagtgattctcccacctcggccttccaaagtgctgggattacaggtgtgagccaccgcacacagccatatgtcaatttaaaaaatatattttattataaattaaatctataaaactattccataaataacttccaggcccagcagttagtcgtctttttttttggcaggggaggttggtttttcgttttgttctttttttagacggagtctcgttctatcacccaggctggagtgcagtggccctacctcaactcactgcaacctccacctcccagactcaagtgattctcctgcctcaacctcccaagtagctgggactacaggcaagtgccaccatgcccaactaacttttgtatttttagtagaaacagggttttaccatgatggtcaggctggtctcgaactcctgacctcaagtgatcggcccgcctcagcctcccaaagtgctgggattataggcatgagccactgcacccagcccaggcccagtagttcttaaagcaaattccaactaaatgtcaaggaacaggtaattacatatcacttcagactcttgcagggaacagaaagaggagaataaatttcccactcatttgatgagaaaagtacagctttgctattgaaatagggcaaagtaatataaaaatgaaaaatcattagtcaatatttcacgtgaacttagacagtccccaaacaaaattttagtaaatcaaagccagcaatcatgaaaaaaaaaaaaaagatagttcacatgaccaaatttggcttaaattaggtatgcattttgggcattcatcattttaacatattaagggagataaatgacaagatcatatgagctgtcacacaaaaagctatttaaaattcaacactcatagatgatttttttttttttttttttgagatggagtcttggtctgttgcccaggctggagtgcagtggcgcaatctcggctcactgcagcctccatacggggctcactaccccgccatttctttctacttcagtttgctaagcttttttttaaaaaaaaaaaaaatcacgtagggccgagcgcagtggctcacgcctgtaatctcagcactttggaaggcagaggtgggcagatcacctgaggttggaagttcaagatcagcctgaccaacatggagaaaccccgtctctactgaaaatacaaaattagccaggcatggtgtcgcatgcctgtaatcccagctactcaggaggctgaggcaggagaatcgcttgaacccaggaggcagaggttgcggtgagccaagattaagctattgcactccagcctgggcaacaagagcaaaactccatctcaaaaaaaaaaaaaaagaaagaaaaagaagtaaagaaataaaaaggaatgtccttaactagaagaagaatatttgcaaaaatccaaaataaatattatacttaatggtgaataattagaaraatttccctaatagtcagcatataaaagaaaggtacaaaaattctttattcccaaattatgattgtctacagacaatattcaaataccaataaaaactgtaaatgcttagaaagaataagaaaattaacaagattgttatcagtaaatgaaactcaattacgtttttacaaccaaataaccatcagttaaaagtgtaattttaaaaatacaacttactagccaggcgcagtggctcaagcctgtaatcccagcactctggaaggccgaggcaggcagatcatttgaggctaggagtttgagactagcctggataacatggtaaaatgctgtctctactaaaaaaaaaaaaaaaatacaaaaattagccggacatggtggcacacgcatgtaattctagctacttgggagactgaggcataggaattgctcgaacccaggaggcagaggttgcatcgagcccaggtcacaccactgcaactccagcttgagtgacagagcaagactctgtatcaaaaaacaaaacaaacaaacaaaaaaaaccaaaaacttattatggcaacaaaaataattctagtaaaaaatgtgcaagacctctgtggagaaaattataaaacttgttaaatgacatttttaaagacacaaatggaagaagagagaggaactctgttcatgaataggaagttttggtatatagatgtcaactgttcctagactgatctgcaaattcaatccaattgaaatgaaaatatcagcagagttttccaaggaacttgaacacctaatttgaaatgaatgatcaagagcaaatggcaaataatttaaacaatcaatataaattgtgattgtaatttagacaattttgagggagaataacaaagtaggtaaacttgctctgtgaaatatcaaaatttgttataaaattataaatactaagatagtatagtattgatatgtggagagagatatacactaattgggggagaattaagcccagaaacagatccatggacccatgcatttataaatatctatgataggaaagagtttgcattgtgtgttggtggtggttaaagatggactattcaataaatggttatggacaaccagttattcagatggaagatataataaaattttgatccctactttatcaacacagacatacacacacacacacacacacacacaaacacacaaacacacatcaggttcaggtattatagtgactgaaataaaaagcataactttaaatttgggggaaaaatatagaagatattgataacttcagggtaaggaaagatttcttaaataagacactccaaaaaagcataaaccttcatcaaactaataaattcaaaaatgtgattcagtgcagtggctcaagcctgtaatttcagcactttgggaggccgaggcaggcaggtcacttgagcccaggagtttgagaccagcctgggcaacatggcaagaccctatctctaccaaaaaaaaaaaaaattagccaggcatggtgacatgcacctgtagtcctagctactcaggaggctgaggtgggaggattgcttgagcctaggagttggaggctgcagcgagctatgatcataccactgcactccagcctgggtgatggagcaagacctcatctgtaaaagaaataaagttgtattttttaaaaaaaaaaaaaaaaagaaaagtgaaaaaacaaggccaaaactgatagaaaatactgacaatactgactgaggaataatacatggagtacataaagaattcctaaaaaaaaaagataaacagcctgccagaaaaatgggcaaaagacactagagacatttcaaaaaaggggaaaatttaaatagcaaaagattttttaaaaaggcattcaactttattaacaaatcaagaaaatgaaaactaaaataaagatatatcattttcatccaccagaaaggcaaaaattgacaagtctgacaatactcagcattggccaggtgcagtggctcacgcctgtaatcccagcactttgggaggccaaggtgggcgaattacctgaggtcaggagttccagaccagcctggccaacacggtgaaatcccgtctctactaaaaatacaaaaattagccaggcatggtggcgcacacctgtaatcccagctactcgggagactaaggcatgagaatcacttgagcccattggggcggaggttacagtgagcctagatcatgccactgcactccagcctgggtgacagagtgagactccatctcaaaaataaaaataaatgaaagaagcatagtaaaaaaaaaaaaagtctagaagaaaaaaagtcatgaagcattaaccatggctagctttgagtgacagatgtcattttcttctttttttttagtagtctctaattttctataatgaacatgtactccttttaaaatcaaggaaaaaaatattttgtttaacaagaccaaccccctaattctaggataaataccacacagttgaaaggagaaggaaaaaaaaaaaagactaggtataaaaataactttctctgggtttgatcttcaagcaacaaactacaatctcaggaactctttctcccctgagcttttctgggtcctacgcaaagaaaccaggcaaagtatgcttgttggattatattgttccctgggcaagtagaaaagagaaaacttttgtgcatttaatgaaaaagcacacaaggcattatttttagatttaccgtaattctgtcccctacaagactctgcagccaagtgaactctgaaagattttcctgttttaagcatcatttgtttctcttgatttttttgttttggtttcgtgtggaggtgagtgcaatgcggcctctactccaggcaggaacttcccttcagattagcatgttctatggtattcatctgatttggactcagccccttgctggcctcagtagttgctacattatttcctgggaggagattaggaatttgaggcagtgagacaataatagtagcaataatgatcagctgggattatggtgaccctgatgcggatgcagaaactgggatgccaaaaggtgaatgatctggatgccccgggctatgaccggctttaccttgagcctcaccctgctgccctaggctccgtcctttagcccctctgtgatgtcccatctgcgtagatgccaagaaccagttccagggctctgctcagaaccccttataaatcttctcatgggcatgtgtgaagaaaggaagaagagggagagaagagagaaggaaaggagagacaagaggaaactcatcttcatggcaatagctactatttgtcatgcttgtcaggtgccagacgtcatcctgggtacatcaatgctatattatctcatttaatcctcaccaaaatgcaataaattagtgatttttaaaaatctatttttcatagaaggaaattgagtttcagagtggttaggtgactttcccatcatcacgtgctctttttttttttttttttttttttttttgagacggaatcttgcttactcacccaggctggagtgcagtggcgcgatctcagctcactgcaagctccgccacccgggttcacgccattctcctgcctcagcctcccgagtagctgggactacaggtgcccaccaccacacccggctaaatttttttgtatttttagtagagacggggcttcaccgtgttagccaggctggtctcgaactcctgaccttgtgatccacctgcctcggcctcccaaagtgctgggattacaggcatgagtcaccrtgcctggccttaatcacatgctctgaaggggcagagctaggactctaggtcccaggaatacagttttggagcttgaaccttaacaatgtttcctcctccctacccccttccccatgcacctatcacagaaccctaaattgttgagcttttcctctgaaacagaaacaaataatacatgtggtttggctgccctcaaatattccggggctatttcctgaaatagcttaatcagaattccctgtcaacccctacaatctccccgcagtgtggcctccacttgaaacctaccaagccccaagattgtacagactacctgatcccccacacaggctttcatacctccaggttcaagtctgtctctggcttcagctgccaggccactcctctccttgctctggtctcatggaatgtcttctcagcccactggagcaaggtgctcctcctccaagaagccttccctgattttattgaattcattagctccttcattcgatcagcaaattttattaagcagctatcatatgaccttcgctgcaaattaaataagagatcagtataccactgaaacttacccagaaagtcaagaaatcctttcctgaaaaatcaatacttgtttaggaatccaaagagtgattaagaggagttaattagaaaaaatggaggagtaggggaatgttgctaagaggaccagatcgaggaaataccatgaaccaacaaaaagaccatggataaatcatagctgcaccataaactagtttgtagaaatatgggcaaggtatttaaccagcctctctgaaactcagtcacctctgctataaaaaagcaggcagtggtgcttctcatgttgtcagaatgcaatgcaaatatatttgcaaaacccttggcacaaattctatcacatagtaggttctcattaaatggcatatccctttggacagatttttcttttagggaatagaaataatttgggatgccaaaagatggtaatctctgtagctatcaaaatcgcagagctgacagtgggatattattgatcaggtcagcttcagatccctgagtcacccaccatgtccgttatttatgtccatgctggaagcttcactgaaggaggggccttcacttgtcttgttcactgctgtatccccaatgctgaagcaatacctctcacagactactaattttaaaatgtttgttgaatgaatgtttgatgactttactcatctgctcaatcaatggtcacaaagactggttccctaactgtcagcatcagcatccctggaaacctgttggaaatgcacattctcaggccccactctggggctgctgaatcagaaactctggggattggctccaggaatcagtgtttcaacaagcctgccaggtgcaggtgctgcttgagtttaagaagcactactctgaaggccgggcgcggtggctcacrcctgtaatcctagcactttgggaggccgaggcgggtggatcacgaagtcaggagattgagaccatcctggctaacacggtgaaaccctgtctctactaaaaatacaaaaaaaattagccgggcgtggtggtgggcgcctatagtcccagctactccggaggctgaggctggagagtggcatgaacccgggaggcggaactcacagtgggccaagattgcgccactgcactccagcctgggcaacagagcgagactctgtctcaaaaaaaaaaaaaagaagcactactctgaaaggagcatctagatagcagcgattggcttactcagctctaatatgcagccctgggcaaatgcattagaactgaaaattgattgcccctcctaggactcaatcctgctgcaaaactcaagccaatcttaagaatgtcagaaccaaactggctcaagaaagagcccccaccaccgccatccacctgtaccagccaccagatgggtgatcctacctttccaaggatgacctgctcttctgagtgcaatcaagtccaactcaaaagccccctcctctggaaagctttgagaaacaatttccaggtaggatgaacttctcccttcccggtgctacaggtgcaggttttcgctatggccaggagcccatagtggttttcaaatacatttagaaatatctcccctctagatatttgccacccaatatggtagccactagccgcatgtggccacggggccccaccagaggggctagtagaaattgagatatgctgtgaagtgtaatatccatactgaattttgcaagtacagatttttaaaaatgtaaaatatctaattatgaattttcatttttaggccagatgcagtggctcacgtcagtaattccaacactttgggaggccgaggcaggaggattgcttgaggccaggagtttgagaccagcctgcacaagcaagaccctatctctacaaaaataaaaataaaaataattagctggggccaggcgtggtagctcaagcctgtaatcccaacattttaagaggcggaggcaggtggatcacctgagatcaggagtttgaggccagcctggtcaacatggcaaaacccagtctctactaaaaatacaaattagccaggcatggtggcaggcgcctgtaatcccagctactctggaggctgaggcagaagtattgtttgcacccgggaggcagacgctgcagtgagctgagatcacaccactgcactccagcctgggtgacagagcgagactcagtctcaaaaaaaaaaaaaaaactagccatgtgtggtcatgcaggcctgtagtcctagctacttgggaggctggggcaggaggatcgcttggccccagagtttgaggttacagtgagctatgatcaggccactgccctccagcctgggtracaaagaaagaccctgtctcaaaaaagtaaaataatttccattttgattaaatgtgaaaatgatattttagatatattgggttaaaggaatatagtattaaattaatttcacctgtttcttttcagttctattgtggcaactagataattgaaaactacatacagccatttgctgcttaatgacagatacgtctgagaaatatgttgttaggtgatttcatcattgtgcggacatcatagtgtatacttgcacaaacctagattgtagagcctactatacacctaaactgtataacataaactcttgctcctaggctacaaacctaaacagcatgttgctgtactgaatactgtgggcaattataacacaatgctaagtatctgtgtgtctacacacatctaaacatagaaaaggtatagtaaaaatggggcccagcacagtggctcaggcctgtaatcccggcactttgggaggctgaggcaggcggatcatctgaggtcagaagttcgagaccagcctggccaatatggtaaaaccctgtctctactaaaaatacccagacgtggtggtgggcggctgtaatcccagctactcgggaggctggacaggagaatcacttgaatgtgggaggcgaagtttgcagtgagctgagatcacgccactgcactccagcctgggcgacagagcaagactccatctcaaaagaaaagaaaagaaaaggtgtagtaaaaatacaatgataatttgatgggaccaccatcgtgcacgcggtcagtcattgactaaattgccattagacggtgcatgatgtctatggccgacattgtctttttattgggcagtaagaattccaccatggtggaggtcagagttcactcacctttggactccagtgcccacctcttgcatatagtaggtgttcaagaaacaagtgtagaaaagtaaaatattttgcaaatttctcaaggcctagaaagaattgtttatcttctcaactacagatgcactgatatcaacatctgggactgattcaattggttccaactcaaaactcaaagaaacaaaacaagtttgtgggatctgaagacccggattctgatgctggctgctaagtagccagatgattttatgtagctcaaccttctgcttaactccaataattgctgtgtgcccactccacaggctcttgggaactgaataagaaaataaataggatcctattgcagagactattagcactggaggagtgagaaattattctccagcccccactttcccatcctatcccctccagttgcctggcctagattttctggaaagctgcagaatgtgcagacattgtgttccctggatttatagctcattttataatgtttttgggtgaggtcagaagctttacacgcactattgttctttttgtcttaacctaaatatgatttctctcaaagaaaagaattcaggaaagagggaatgggaggaggctactgagaggaagaaagttcctgtcctctttctcttatttacccagactttggatctcagtccatatctagggaattggagggaaaattatcatcttaggcagggcacggtggcttatgcctctaatccctgcactttgggaggccaaggcgggcggatcacctgaggtcaggagttcaagaccagcctggccaatgtggtgaaamcccatctccagccgggtgcggtggctccacgcctgtaatcccagcactttgagaggccgaggcaggcagatcacgaggtcaagagatcaagatcagcctggccaacatggtgaaaccttgtgtctactaaaaatacgaatattagctgggtgtggtggtacgcacctgtaatcccagctacttgagaggctgaggcaggagaatctcttgaaccccagaggtggaggttgcagtgagccgagatcacatcattgcactccagcctgggtgacagagcgagaccctgtctcaaaaaaaaaaaaaaaaaaagttgtcatcttaagagtttaaggtttatcttataccagccttgcaaatatcaaaaaaatgcaatagcccaccagatgtctaattcagcaattgtcactgatgcaattacagtcaatcctcatttaaagattccatatttatgaatttgcctccttactaaaatgtatttgtaaccccaaaatcaaaacttattgcactttcatggccattcacagacatgggagaaggaatgaaacatctgagtcacccacataccttcccagctgacgttagcaaggtggtactctgtcttcttgtttcagttccccaactatatatgtgtcctttttgcaacccatttagtgccacacacatttttcatatgtttgtgctttttgttttgttttgtcttgtctttttgtttgttttgttttgagatggagtctcgctctgtcccccaggctggagtgcagtggcacgatctcagctcactgcaacctctgcctcctggggtcaagcgattctcctgcgtcagactcccatgtacctgggattacaggtacaaacgaccacgcctggctaatttttgtgtttttagtagagatgggtttcaccatgttggccaggctggtctcgaactcctgacctcaggtgatctgcccaccttagcctcccaaagtgctgggattacagacatgagccactgcgcccagctgtttctgctttttgttggtaatttggctgtttaacgtggtctccaggaacagtgctgaagtgctgtctggtgttcccaagcctaagaaggctgtgatgtgcgttataaataagctttatttaggcattcgttatattgctgtaggctgtgaattcaatgttaatgaatcaacaagatatattaaataaggtgcctttattttattttttttgtttgttttttgagacagagtctcgctctgtcacccaggctagggtgcagtggtgcgatctcagctcactgcaacatccatctcctggagtttaagttattctcctgcctcagcctcccgagtagctgggattacaggcatgtgccaccacacctggctaatttttgtatttttagtagtgacagggtttcaccatgttgaccaggctggtcttcaactcctgacctcaggggatctgcccacctcagcctcccaaagtgctgggattacaagcctgagccaccacgcccagcctaaataaggtgtctttaaacagaagcacacatacgacacagttacatattgattggtgggtgaaaacattgggaccagagattcaaagggaccttacccagtatatcccctgggagctaccgtttagtattcagtaattcagcgttcattgcaactttacagaaaacagctgccacaaataatgaaaatcggccgtaaattttttaagtaaatgagttcagagttatgccctttgaatgtgttactctttccacgaatctagctctctgcgcttgctcctctcctgtctttcgaatggacagtcactacctggtgacatgaagcagatatgctcaggaaagacaaggatggggaagctaatcatttctcagtgctctttggtagggaagcatctcggtctgctttttgttttttgctttattttatttttttttgacacggggttggactctgtcacccaggctggagtgcagtggtacaatcacggctcattgcagcctccacctctcaggatcaagagatcctctgacctcagtctcctgagtagctgggactacaggtgtgtgccaccatgcctgggtaatttttatattatttgtagagatggggtttcaccacgttgcccaggttgtcccgaactcctgggcttaagcaatcaggcccaccttgggcttctaaagtgctgggattacaggcttgagccatggcgcccagcccctggtctgttttatattgttcaggggagggattatgttggtcaggcacagacatcagcatgtagactaaggaatagaactcaatcctctaattgggcagagaggtgccaatgtactgttattagaagaaagaaagaaaatgccttaccctttacgagcttactggctcatggaatgcagaacagaagatagccagacaataataaataaaacagggacctttgattagctgcctggcatgaaagtacacttgcctcagagagggaaacctatgaccctatttcctgagtcattcatctggcgcctctcctgccccgtggaaaggtcagaggttgtggagtcagacagatatactaatagattaaaagcctgtctgccccactcactggctgtgtaaacctcagcctcagttttcttatctgtaaattgagggctaatagtacctatttcaaggagatatcgaaaggattgagagaaattaagtgcctattacaatacgtggtccatactgggttattcagtaaggttcttcagygttgccatcttttttcactattgcacgttgatttgtgaatatgatctctcagtaaccctttctcctggagaagaaagaatcatgtgtcaaactttcagtccttttgcaaagtttaattgtgtgcctactacttagcgagccccgtgtgatatgggagaaagagaaatgtaaagctcgtatgacctcgttctgaaggaactctcagaaaaaacaattttggaatcaataagaattatctagaataacaaggacctggttaacagactgactttactccacatctaagaaattccagacttggccaggcatggtggctcacgcctgtaatcccagcactttgggaggccgaggtgggtggatcacctgaggtcaggagttcgagactagcctgggcaacatggtgaaatccccgtctctaccaaaaatacaaagattagccaggcgtggtggcacacgcctgtaattccagctacttggaaggctgagtgaggcaggagaatcacttgaacctggaagacggaggttgcagtgagctgaaatcgcatcactgmactccagcctgggtgaccgagcaagactctgtctcaaaaaaaaaaaaaaagaaattccagacttgatagtaatgsctatttgatatcaagcaaaatcaggtctgttttcctagtagctgaacttgttctcctcttctttcttataaagaaaagtctagatatcgtaatgctgactacaattgcattatatagaacttaatttgttttaggatacatgtatttaaaaaaaagcaaaagaattctacaagacaaaaagaatatgtacaacttcttcaaaaatagtctggtctgatattctcataataaattaattttgaaaatgtgttagagaaatgcaaacagggcaatgaataagggttaactttctacatgacatatttctttaatgcttgcaattttattcaatgaaagcattaactttttatccgaacaaaataaaggttattttggtttttcttaagccatgagaagttgaaagaaaaataaaatcattcctattcccaacacctactattaatattttggtgtgtttccttgcaaactttttctctgcctacttagtagcctgtatttacacagctgggaccatagcataaaatattacatcctgcttacttcaatcataatgtaagcatttttcatttataaacttttcataaacatttttaatggctgcataatattccattgagcagtatataatcatttacataatgctactcctatattcaaacacttaggttatttcaagcttttctctattatatataaagttttaatctcggtgcatgaatccaagtctgcactttggattatttccttatgacagattcccagaagtggaatgacgagctctaaggcaatgaacatatttcaggcctgtgatacagattgccaaatcgctttcccaaaagagttgtaccatttcacactcccactgacgatgttgcttattccatttttaatggcatcatatgactgaaatggccaatagcaaggtttacataaactatgatacatctagccagtgaattatacagcccatgaactttctaatggggtctgggtaacagcatggaaaaacagttatgctgcaatgttaagcagaaaaagcagaacacagaattgaatgttattgccagtgcctcagaataataataataataataaatctgcctaaggataaggaccaggaaagcaaaacaaaaccaaaaaaataaaataaaataaaatattgacatgtatagtaagtgtggcaaggtgatgactgcgagattgataactgtctctctggttgtaattattttcactctctgtgttaatttcaccttgtgttgctatagcactgttcaatatttcaaaaacttcacataccagcaaagtattcgggttacaacactgcacagtactgaatttctcaaaagcttctcctgcaggattctagcatttccaaaactggcccaagtgttttcgcggctaaaggatcatggtggtcttttctgaattcccagaaataattaagtcaatgaatggaattttctgaaatgtaaattctcccatgacttctttttcctcaaacctctggcaactggcaccactcttctgctagagatgacaagaatgaagacttcacaaatagtaacagaaaaccactgaaacagctggtcacattctatggatcctggccttgtggttgtactattttaccacagcatagaagagagtcgtattttctgctagcaaaactgttccaagtcctgtgatggagtgaatatcaataggttgtgacgatcccccagaagcattgtgatgtcagttgccgacattcaccagctgtacagacgtgcgcacagctgagttctgacccctcccatcccctgccctgttctgggagggaaaaatacaggggatgacataacccagggctgatgggggctgcttccaaaagtaacgggagaagcaacagtgttcttaagaagccaccacccccagtgccttgtttgatatttttcctgtgtctagtcttttccctcctcagccgatcttccacactgactttaagtatagctacctaaaatctttctacgtcaagtataatccagggaccggtagcctctgcatacccckgggaacttgttaaaaatgcagaatgccccatcccagacatatgaaatcagaatctgcattttaacaagatccccaggtaatctacttgcacactgtgtttaagaagcactgggggccgggcrcggtggctcacacctgtaaccccagcactttgggaggccaaggcgagagaattgcttgagcccaagagtttgagaccagcctggacaacatagcgagaccctgtttcacctatttatcattccttgaatacattaaggctttctcaagcccaacaaagcgcaactttgtatgtgcagttcccgctgcaagaatgcctttccacaaatggggaaatcacgctcaaccttcaaaacccaacccaggccaggcgcaatggctcacacctgtaatcctagcactttgggaggctgaggtgggcagatcgcttgaactcaggagttcaagaccagcctgggcaccatggcaaaaccccatctctacaaaaatacaaaaaaaattagctgggcatggtggcacgggcctgtagtcccagctacttgtgggggctgaggctggaggatcgcttgagcccaggaagtcgaggctgcagtgagccaagatccagccactgcactccagcctgrgtaacaaagtgagacctagtttcaaaaacaaaaaaaacctgatccaagtactcctccaagaaacctgcttggtctcctcctcccaacacactccctacttctccttcctgtgagctccacagccctagttttgtttgtttgtttgttttgttttgtttgagatgcagtctcactcttgtcccccaggctggagtgcaatggtgccatctcgggtcactgcaacctccgcctcccgggttcaagcaattctcctgcctcagcctcctgagtagctgggattacaggcgcccgccaccacacctggctaatttttgtatttttagtagagacggggtttcaccatgttggccaggctggtcttgaactcctgacctcaggtgatccacccatctcggcctcccaaagtgctgggattacaggcgtgagccactgcgccggtcagccattgtattttaagtagtctatgtgtgtatgtgtgtgtattcactactaagtgacaatttccttgttggtggctcagtagacacttaagctatgtttgcaaaatgggaatgactgattgaataaatgagtgctgcttctggctctgcaacatgataactgatgtgattttcctctttgaaaaatgccctagatgttgtgaaaatcaaataagttctgtgcatggaaaagtgattcgtaaactgcaaagatctgcagaatttacctaaatctcagtgctctgcaagggccatccctggatctgcctggggttggccttgtgataacgacccaagaggatattgatatatacagattccgaggccctacctgcagagattcagattcaagaggaattctgcattttcacaagcttttcaggtggttcagtatgaagccaaatctgggaacagctggcttgtgagttcacctctcacttcttgacccagggcctggacttgagcgaggcaggagaagaaccagagtgaatatttaaggaggacctcattctcaagggcatgcaagtgcgggatggtccccctgagagagcgagccttcttaaaaactgtgcaccctaggagtcctttggcagtgaccaccggcaaagcacgtaggatcatccagtgtgacccctgtctgagcctgctgcctggggatctccagggcctcagcctcaggcaggcccaggtgagaygaggacaagatrcccacacgaccttgaaattccaggcccgaccactgcagccccrttaacggcctgttttcccttaagtggagaagaagcagactaagtctaacctcagtgcctcatggagtctgaccaccacagggcaccaggatcctttgaagagcccaggtcttggcactcaagcaagcagatttttctcagttgttcagaccccccgtgccagctctgagcattctagactcctggtggtcagcatcctctcaggctcatggggactgtccctaggttgtcatgtgtggaggttaagtgacttcctacccctctgacttcccagaaggcacaaagctcactctcctccttccctcttttcctttttcatgagctggcctggctgtgtcaggcagggtcaggctcagcagaaggcacatcacatatatcttttttattaaagacagggtctcacttgttgcccaggcaggagcacagtggcaygatcttaactcactgcagcctcgaacttctgggctcaaacaaccccccacctcagccccccaagtagctggaactataggcccataccactatgcccagctaatttttttgtattttgtagagatggggttttgccatgttgcctcctgagtagctgggactacgagtacaccactacactcagctaatttttaaaaaactatttttgtaaacaatggggtcttgctatattgtccaggctggtctcaaacttctcacctcaagtgatcctcctgcctcggcctcccaaagtgttgggattacaggtgtgatccacagcacccgccattttatttttttttttagagatagtcttgttggcattcagtgatataatcatagctcactgcaggctcagactcctgggctcaagcaatcctcctgcctcagcctcctgagtagctagaactacaggtgtgctccaccagagggccaatttttwaattttgttgtaaaaatggggtctcatggctgggtgcagtggctcaygcctgtaatccaagcactttgggaggccgaggcaggcggattacctaaggtcaggaatttgagaccagcctggccaacatggtgaaaccctgtctctactaataataaaaaagtagacggatgtggcagtgcgtgtctgtaatcccagctactcaggaggctgacgcaggagaatctctggaagctgggagacagaggttgcagtgagccgagatcatgccactrcactccagcctgagtgacagagcaagattctatctaaaaaaaaaaaaaaaaaaaaaatgggtctcactgtgatgtccaggcaggtcttgggctcctagactcaagcaattcttcccccttggcctctcaaaatgttgggtgtgagccaccatgcccagccatatttctttcctgtcaccattactacatctcacaaggcgggtactattatctctatttcacagatgatactacggttcaaagaggtgaaggaatttgttcaaaatcacaggacgagccaaaggcagacgggatttaagccccaaagctcttcctctccttcctctgcttctctaaatttgttttattatattcatgtgtatatgtatatatatgtatatatttatgtaatttcccctgctttgcatttctaaacttcttcctgattttcctggagcatctgtggttaacagtaatcagaaacttgggttctagctgtttcccctgagggtgtttctccaatctgagactggattcttaagggattttagagtttgtgtgtctgtgtttttcggtgtacctctttcaaaataatgtgtttagacaacatattagcatcttttaaaggctgggagtaagggacgagggcagaaaacactgccaatctaaaattccatacccagtgaaaacagtttttggccaggcccagtggctcacgactgtaatcccagcactttgggaggctgaggcaggaagattgcttgagcccaggagtttgagaccagcctgggcaacatggcaaaactctgtctctactgaaaatattttttaaattagccaggcgtggtggcacgcgtctgtggtcccagctactctgaaaggctgaggtgggaggattgctggagcccaggaggctgaggttgcagtgggctgaggttgcaatgagctgagatcataccaaccactgcacttcagcctgggacagagttagaccctgtctcaaaaaaaaaaaaaaagaaaagaagaaagaaaaaaaaaaggaaacaggcttttaaaatgaaggtaaaataagattcttcgggcagaagaaaaataattccatatgaaataatggaaatgcaaggaaaagggcaaacataagtgaatattgactctacaaaagcaacaatgataatagtatgtgtaatttaaaatatatgaaaaatgaggctgcggccgggtgcgttggctcacgcctgtaatcccagcattttgggaggctgagatgggcgaatcacgaggccaggagttcgagaccagcctggccaacctggtgaaaccctgtctctactaaaaatacaaaaaatagctgggcatggtggcgggcgtctgtaatcccagctactcataaggctgaggcaggagaattgtttaaacctgggaggcagaggttgcagtgagctgagatcacgccatcgcactctagcctgggcaacagagcgagtctgcacctgaaaaaaaaaaaaaaaaaaaaaaggaagctgggcgcagtggctcacacctgtaatcccagcactttgggatgctgaggtgggcggatcacctgaggtcaggagttcaacactagcttggccaacatgatgaaaccccatctctactaaaaataaaaaaattaactgggcttgatggcgggcacctgtagtcccagctactctggaggctgaggcaagagaatcgcttgaacccgggaggcggaggttatggtgagctgagatcacgccactacactccatcctgggcgacggagtgagaccctgtctcaaaaaaaaaaaaaaaaaaaaaagatgacaaagaaaaggttgtgtaaaaatccaaccatcaaaatactcaaaaccaaatttgtgatattatagcataggcgtctttgttattgcattaaataacaagatctgatggtaagtctaatttctaagtcatagaaatgagcataaatgatacttgggaaatctactattactttcatttgatattaaatacaaatttgcatatacaacacacataacatatgcacacacggttgccccacattagcagagacaaaatgaaawggaatctactgcctttgagaaataggacaagatgcaatggctcacacctataatcccggcacattgggaggccaaagcaggyggatcacttgagcccaggggttcaagactattctggacaacataatgagactccagtctaaaagaaacaaacaaacaaacaaacaaaactcaaaaataaataaataattaagaaaataaatgtatcaggtgtggtggctcatgcctgtgacgccagcactttgtgagactgaggcaggcttgcttgagcccagaagtttgagaccagcctgggccacataggaagaccctgtctataaaaaaaaaaagttttttaggtagccaggtgtgatgatgcatgcctgtggtcccagctccttgggaggctgaagtggctggatagcttgagcctaggaggttgagactgcagtgagctctgtttgcaccacttcactccagcctgggcaacagagtgagaccctgtctcaaaagaaaaaaaaaaagaagaagaagaaaagaaaattaatggcaatgcaaaatggaggctgggcgcaattgctcatgcctgtaatgccagcactttgggaggttgarctaggcagatcacttgaggtcaggagttggagaacagcttggccaacatggtgaaacctcatctctgctaaaaatacaaaagttagctgggcatggtggcacatgccagtagtaccacctactcaggaggctgaggcaggagaatcgcttgaacccaggttgcagcgagctgagttcatgccactgcactccagcctgggcaacagaccaagactcatctcaaaaaaaaaaaaagtgggatgcctccagtacagcaaggactccatttccttaaggctattccatttaaagtgtctgcataaaatcctcatggggtctccaggattgcccagaaagagggtaatatgactcttttcttgaaaaaataggtaacatttagtcctctataatacaagaaaagaaaattttaaaaaatttttttggttttggagacagaatttcactgttacccaggcaggagtgcagtgacacaatcacagctcattgcagcctccatctcccaggctcaaatgatcctcctgccccatttttaaattttttttgtaggaatggggtatcactatgttgctcaggtggccttgaactcctgggctcaagagatcctcctgccttggcctttccaagtgctgggaattacaggcgtgagccaccatgcctagccccaaaaaaataatttttaaaaagtaggaagcaaaggttctcatatgaggtcacagctactgaaagaagtaaccaatgaatccacagacctctctcttgcctgtccaataccccacgcaagacaactagtcaggcagagacttattagcagcttatcagcacggaactggaaaggactgcccattatctgggtaatagaagagataagtgtgtttggatggggaggagaatgtgtgtttaaagtactgttgtgttgtcaattctgattctcccaaactatcagagttgcctaagtgaccctgtatcaggtgcatcaccgagaaatgctaatttccaaaacaagccaagtgggaatgaatcacaagcaatccaacacatggtaacggaagacaggaatccctgaacttagccactggttgtctcgggcgctggcggtcagagatgtgacaatgagggcagatggtgaggctccttagacagcagagaaaggggtttgggatttttatgacttgcagaaaatggggaaccgccaaaagttttgtaggagaggagaaacccaccgggcactgtgcttcaaggtcacagagttcatctcggagcaacaaacactttctagggtttgcttcacatggatcttgtgctaggcacaggcttgaggtggcgaaagaaagatcgagttcctgttcccagagaacaaacaatccccacagtatgacaaatacagtgatggggccaggcggggtggctcatgcccataaccctagcactttgggaggcagaggcaggcagatcacctgaggtcaggagttcgagaccagcctggccaacatggtgaaaccctgtctctactaaaaatacaaaaattagctgggcatggtggcacgtgcctgtagtcccagctatttgggaggctgaggcaggagaattgcttgaattcaggagttggaggttgcagtgagccgagatcaggcctctgcactctagcctgggtgacagagtgagactctgtctcaaaaaaaaaaaaaaaaaaaaacccagatggaaaggagctccaggagggttttttggaggaggcagacctgactgaaaggctgacaggtaggagtgagccagataaagagggggctgtgaaggcacttatagcaatgggaacatctttggaggggagggagaacaaatgtgagtaggatggggtgctggacacctctcatctgacccccagatccaytctgtacatttcagcactttgctctgtgccccaggcagttgaacttcatggactacattcatgataaccttgaccttggtttctggtcaggttctgcctgtggaagacactggcaggagatgggaggtgargagaaaggctggtatrtatatcccctgctctccctctctccttcctcttgacccttcaagccagggggagtggatgaggtgccctctgttatcagtctcaaagtactgctttttggttttcccaaaccctactaaccctccataaaagttgctttattaaatacccccaaaggtatcctctgtaccctgctgggaccatgactgatacagcagcatggaggaggtttttcattatccaaatacaatatgaggcgcggtggctcacacctgtaatcccagcactttgggaggccaaggcaggcagatcacttgaggtcaggagttcaagaccagcctggtgaacatagtgaaaccccgtctctgctaaagatacaaaaacattagccaggtgtggtggcggcccctgtaatcccagctactagggaggctgaggcataagaattgcttgaacctgggagacggaggttgcagtgaaccgagattgcgccactgcactccagcctgggcaacagagcgactcagtctaaaaacaaaacaaaacaagaacaaaacaaatacaacatgacagtctcctaaactaggagaggagtgggaagattaccttgtgaatgtacagcactctacagcaacaaaggcttttctcagcatggacttatccacagctcccaactaccccaggtcagaggccaccaattccatctcacagatgtgcagcagcagaggcctggagagtatgtggagacttggccaagagacatgacctgtcagtgagagacccagagcccacagcctgattttttcagttgctaatccattccctttctaccagtgcagctctaagtgggcctggaatggtggaagaaattcaaagaggccttccaggtgcgtgcacacatacatgtacatgtcttccacaggaatcagtgagtcattcaacaaacatttattgagctctgactggatttacagacctgtcttagaaactgagggatgaaagagattagatatggggaaaaggagaatgagtcagaagraggggtggaagcacagggtggtagaagaaaacactggccccgcagtcyggcagtcctggttcccaggcccagtctatgaaatgtgtctctgagatcttccatcgactgaacctggagagatcagccatttctggttttgaacaaagaagtcaagtcaatttcagatgcagctgcaagctgaaattcctccaacagctctagacttctgggcatgacacacaacaccctttatcaactggccttctctcatctctccagccttgattgccggaggctctctgcctcccatccttctaccctgacattagaagctacccacagcttcccataagccacacttgctctcacctccaagactttgcactagctattccttgtgcctggaaggctttttctcacacttagctctacagttgacccttgaacaacacaggagttacaagtgccaacctctcccacaaccccacatagtcaaaaatccacaaaaattctgactccctcaaaacttaattactaatagcctactgttggccagaagcctttctgataacatagttgattaacacatattttgtaggttatgtgcattatatactgtattcttacaataaagttagaaaaacaattatctatctatccacccacccactgggtggcatgagccactggggatggtggctcatgcctacaatcccagcaattttggaggccaaggtgggcagatcccttgagtccaggagttcaaaaccagcttgggtaacacagcgagaccctgtcactacaaaaattacaaaattagtcaagcacggtgccatatgtttctaatcccagctactcaggaggctgaggtaggatgatcgaatcacttgagcccaggagatggagactgcagtgagccatgatcacaccacagcactccagcctgggtgacagagcaaaaccctgtttggaaaaaaaataaataaataagagaaaaaatatacctactattcattaagtgaaaatgtatcatcataaaggtcttcatccttgtgattttcacattgaataggctgaggaggaggaggaagcaggggcttggtcttgctgtctcagaggtggcagaggcagaagaaaatcctcctataagtagacctgcacagttcagtgctgtgttattcaagaatcaactgtaatttcttcacctgtaaaaygcttactcaaacttcaagattcaattcaggctaattactgtatcctcagtaatacccgcacagagaaagcccccaaatcttggcaaataatgattcaactgattaagtaatcataaaatagctaccatgtagtgagtccatgtccatgggataacaataaaaatatcaaacaagctctttggggactaggaacttgaatgtagctgaagagtgagtgagcagggagatgattagatggatgagtaaacagatagataaaaacgaatggatggcctagcgcagtgactcacacctataatcccagcactttgggaggccgaggcaggtggatcacttgaggtcaggagtttgagaccaccctggccaacatggtgaaaccccatctctactaaaaagacaaaaattagctgggtgcggtggcatgtgcctataatcccagctactcaggaggctgaagcacaagaatcatttgaaccagggaggcggaggttgcagtgagccaagattgtgccactgcactccagcctgggtgacagagtgagactctgtgtcmcaaaaaaaaaaaaaaaaaaaatggatggatggagaaatagatggattgaaaatgagtgtgtgacagttggcagatgaatggggaattaaatggatggatgacttcatgaacaaatggttgaatggatgggattacttgcttgcattgatcaaaacagacttgacctaatctcaaagtggtaagaaaggagaggaatctagctggtgagattggaactgtggagcttaaaaaaacgttgagaatcttactagcaaacataaggtctgcttgtgaacaagttactatcatcacaaagctctgaataagttccaatctgctattccaggcgaagtccggaggatgatgccagccatgagagtctgatcaactggactgactgatcaacagaacttaacttgctggaagtctattggagttaggtcagatatagaaccttaaggctttgggatctgacaaaaacatctgtatttgtgattcttatgacaagacggcaatgcacaaatcgatgtgagaagacaggaggggtgcatgaactgctaactcctcttactgtcagaacttcaaagtgcaggttttgcacaaaccagcctgcctccccaggacctctcagcacactttcattatgatggactttcttgaatctcaaagtattctgacagctgtgtcccagaccgcattgctccttggaaacttgaacttcacattaaccccatctcctctgttacyccacaatctccctttacctcccctcatagagggtgctcatggcttgcaaatccgtagcttccagagggctggggagagcactctgatgaccagacmaatgctgcttcacccaggaaaagccctattgtaagttatgactagggtagggatggatttcctttggagccaaagatgaagcattagcaagagtctgctttcaatgagagtctgcagtgtaagggaatttttttctttttcttttttttaattacagaacttacttttcttttaaaaaagaattcagagctagcacaggaaaacagtgaggtttcaaaagtacttcagccttgacaaagcccttcacatagttttgatttttgtttgttttttgatatgcagttttactctgcctcccaggctgaagtgcagtggcgcaatctcagctcactgcaacctctgcctcccgggttcaagggattcttgtgcctcaacctcccgagtatctgggattacagcgcgtgccaccacacttggctaaattttgtatttttagtagaaacggggtttcgccatgttggccagactggtctcgaactcctgacctcaagtgatccacccgccttggtctcccaaaatgctgagattacaggcatgagccaccgtgcctggccttagttttctttttgagctccacaagacccttctaagaagggtttctactttggctgcacaatagaatcacctggagagtttttagaactcttgatttctaaagccggatcccagaacaattacataagaatcatggggatgaagtgggtctgagccccaggtgattccaatatcagcccaggtaaaaacaagtgctccaaggtcttagcctcattttgccaaggcaggaggctccagaggggtgaaataagttggccccagatctcaagcttgtgaaagtgaatttcaaaaccaggtcctctcttcactctctgtgttcttccagatgtggctcttatggccactgtaaaaagtagtaactaatatgtacagttgttccctagtatctgagaggaatacatttcaagatccccagtggatgcctgaaaccacggatagtaccttatataaaaccatgatttttctttttaaaaaaatgtttgctgggcaagatggctcacgcctgtaatcccaacactttgggaagctgaggcaggaggactgcttgagcccaggagttcaagaccagtctgggcaacacagggagaccctgtctatataaaaagttaaaaaattagctgggtgtggtagcttatgcctgtagtcccagttacttgggaggccaaggtgggaggatcacttgagcctgggaggtcaaggctgaagtgggccatgatcacaccactgcactccagcttgagtgacagaatgagaccgtttcaaaaaaaaaaaaatagagatagggtctgtgtcatcctggctggagtgcagtggcatgatcagagctcactataacctcaaattcctgggctaaacatttctcctgcctcagccttctaagtagctagaaccacaggtgtgtgctgccatgcccagataattttttttttttatagacacggggttttgctatattgcccaggctgatcttgaactccggggctcaagtagtcctcctgccttggcctcccaaagtgctgcgattacacacatcagccactgtgtgggccctatactatggctttttgatctgaaacctctattattatacccattttactaatacagacccaaagctcagggcagtaaacacacctaggaattgttggggtttgaactctggtttgtctgaaaatatagtctatgttcttcatcatcatgctgtaccttctcaatttttttttttttttttgagacggagtcttcctctgtggtaggctggagtacagtggcctgatctcagctcactgcaacctccgcctcctgggttccagtgattccccagtctcaacctctagagtagctgggattacaggcaactaccagcacatccggctaatttttgtatgtttttttttttagtagagatggggtttcgccatgttggccaggctggtcttgaactcctgacctcaggtgatccacctgcctcggcctcccaaagtactgggattacaggcatgagccatggcgcccggcctcctcaaatatttttgaatatctgataacatccctgtaacttgatcatgtgttcaggcaatgagtctaagaagagaatatttaatcaaaaacaatttttttttttaatttttagagataaagtttcactatgctgctcaaactggtcttgaactcctggcctccagcaatcctctcatcttagcctcccaaaatgctgggattacagagaagagaacatttaaatatgacttgtttttttcaccttcatcattccttasacagcttcttccatctagaagtggaagagcagtatagagaagaggatatagttgtatataatttgtcataagtatatgacgtataagttattatttatacttatggtatatatatatgtatcataaaccactggactcctcattccatcatacattcctcttcccttccaaacataccaagcaatttttcacacttattatgtcatttaatagacataataggcctataaagtagtttctaaaatgtctgtttcccaggtgaagaaactcagccctagaggaccaaatgatacaactaatgtcatcagtgacggagcctggatggcctcaagccaatctgcctccagagctcaagagctgagatatgcctttctccctgcacaaccgtgaccttacaccctcaacctgtcatcagaactaaggaaattctgttttaaccaggagaaacaattatttgggtataggttaaatgcataattatacatgtattttgagtagaagtagatggtttagaggtacaaagatcaagaatattttggcatagagatgaaccaaaagttgagccttctacactggctgatgtcagctgaaagctgagcctaaggggataaaaggaaggaaagacctacacctcaatggcaacttttttttttttttaaagaaacagagtcttgctctgtcacccagactggagtgcagtggttcaatcttggctcactgcaacctccgcctcccgggttcaggtgagtctcctgcctctctgcctcccaagtagctgggattacaggagtgcaccaccacaccctgttaagttttgtatttttagtagagatggagtttcaccatgttggccaggctggtctcaaactcctgacctcaggtgatccacctgcctcagcctcccaaagtgctgggattataggcataagccaccacacccggcttaatattttataaacaacaaaaaaagttcctttgcttgaatccaaacatagttttgagaccatgcgtggtggctcatacctatagtcccactttgggaagctgataggaagatcacttgaggccaggagctggggaccagcctgggcaacatggcgagaccctgtctctacaaaaagttaaaaaattagccaggtgtggtgtcatgtgcctgtagtcctagctatctgggatgctgaagtgggaggatcacgtgggggtcgaggctgcagtgagccatgatggcaccactgcactccagcttgggcaacagagtaagaccctgtctcaaaaaacaaagaaatatggccaggtgtggtggctcacgcctgtaattccagcacttagggaggccgagggcaatcggatcacttgaggccaggagttccatggcccatcctgttccatgcctcatgcagctgcatctatctgcaatgccttttttattttttttttgtctcgctctatcgcccaggctggagtgcagtggtgtgatctcggctcactgcaagctccgcctcccgggttcacaccattctcctgcctcagcctcccgagtagctgggtctacaggcacccaccaccatgcccagctaaatttttgtatttttagtggagacggggtttcactgtgttagccaggatggtctcaatctcctgacctggtgatccgcctgcctcagcctcccaaagtgctgggattacaggcgtgagccaccgtgcccggcctctacctgcaatgcctttcttccctcctcagcctccaatgagcctgctcaaaagtcagctctggtcacacgggaatcccatcccaaaaccagagtgcatcttttacccctcgctctcacaacacatatgggttgagtatccctcatttgaaatgcttgagaccagaagtgttttggatttaagatttgggaatatttgcatacacataatgagatatcttggggatgagacccaagtctaaacacaaaattcatttatgtttcatatacaccttatacacatagcctatggcaattctatacaaaatttttaacaattttgtgcaagaaatagttttgactgcgacctatcatattaggtcaggtgtggaattttccacttgtggtgttacgatggcactcaaaaagtttctgatcttggccaggcatggtcgctcacacctgtaatcctagcacttcgggaggccaagacgggtggatcacctgaggtcaggagctcgagaccagccaggccaacgtggcaaaaccccatctctacgaaaaatacaaaaattacaggtggcgcatgcctgtaatcccagctactcaggaggctgaggcaggagaattgcatgaatccaggaggaagaggttgcagtgagctgagattgtgccactgccctgtaccctgggcgacagagcgagcctccatctcaaaaaaaaaaaaaaaaaagtttcagattttgaatttttgaattaaggatgctcaaattatactatattttattgagatcactgctttccacctcccccagtatgcttggcattttcagggcagagatttatatcttactgtttatgtatcccaagcatctggcatggtacctcctacatacggagtgacatcagaattttgaagaatatggccagcacagtggctcacacctgcaaacccagcactttgggaggctgaggcaggcagatcacctgaggtcaggagttcgagaccagcctggccaacatagtgaaatttcatctctactaaaaatgcaaaaattggccgggcatggtggcgggtgcctgtaatcccaactactcaggaggctaaggcaggagaatcacttgaacccaggaggcagaggttgcagtgagctgagatcgggccactacactccagcctgggtgacagagcaagactccatctccaaaaaaaaaaaaaaaaaaaaaagttttaagaataaatgaatgttgtccacacctcaattcttaaaagcttatacttatgtgtagcctctgcctataagaattaagcctgggtgtggtggctcactcctgtaatgccagtactttgggaggccaaagtgggaggattgcttgaggccaggagtatgtgaccagcctgggtaatatagtgagaccctgtctctacaaaagaaaacaacaataatgataaaataatacagatttttttcaagaaagttaatgtttgtaatgggtcccttaatttgcacagaacttcaaattaaattattccaatctttggagtgaccctcagggtattattatgacctttcccagatgagagaaacaatagccaaaagttacactgtcaaaactggtggaactgggatcctggcattttggccctcccttctccactgcaatgccagcccccgagatggcatgtacaaatctacgttatctgttatttttcmcatgctgccagcatgtcacaaatccagtctaaataaaatgtacaacttcctcttgctaccacagctcaccctccagctaggatttctaatttgctgtcaccaacagtatccattcctggactgtgctcatgccttttccataaaccaggaccatctctgggaatctgctctccttctacccaagcccaaagcaagtcttgggaaggggaaggtcacaaatccacctgttagagaagggagtttctagttcaaaaaaagttcttcctctacatctctaggcataagaaccctattccagtctcaagctacctccaagaaaagtggctcatccaattggccctgttaattatgcccaggagatgatcctggaattgtgtttgtgaacattaaaatcctaatgaaacgcactaggaagcttggcatttaaaggattcctgctagcaatgagtaagccacagtgaagattccttctggaaggggagtaactgaccccagagtaattgtcctgttcatcttattgatacctaatgggttgacttaaagaagcgctcaccagctcctacttccgggcctggaattcttggaaatgtggtctttccgggctccccaatgcttggcattggagcctcgtttcctcattctgcttccctttcctcctgaaactgtttatagacctgaggtcccgcttgtgagctgaggaagggctgagggccctcagtgagttgtccacctttgggaaaacgaagacacagggtgagcaaagcaatgtgctaaatgacaaatagttaaagatttgtctagatttcacaatggctctgtgtcttatatcactttcatttttatgtcggaaacaggattcagtgcctcttactcacggttgcatcattgatgacagagagacattgtgtttcttggcagaggctggcccttacagatgaactggggagagggggctcatgctgggcctgaaacgtactttaggaagcctttttctctcccctgttggagacacttcctcacatttctctcaacaatgggttctaagcccctccaccccttcctcaaactaacagcctcatgcaccccaaacaggctcattcaccctgagcaaagaagaccccatcctacagtcccagtgttcctcatccacacttctgggcctgcctcccttcttcctttcacctaagtctgccacctccccatccatctgcccaggagcatcacactaaccaacaactcctctccctaaggtgtctgcaatcaactctttccaccagcccttcctgtcaacatccaaacatgcccaggtttctcacactgaaaaattaaaaaataagtaatcctttcacccgacttcccctccagttatggccttagctctccctgcacagcttcaaaactggcatcaggcccatcctactcccaaaacagttcttaacaaggtcactgtgatctttggttgatcaaacccagttgtcagtctggtttccttcctccttcctccttacagctgatgctcacttcgtcctcccgagcttttcttgcccactaactgctcccacaggttcccagcttcagcaggctcctggcccccatgggcaggactgggagaagttctccctgtagacagaccggcccttgagaagccacattacagtcttgaagggtcctatgttatggtcatgtgatctaaaaattagtactttaatagagaaagactccaagtccccatcaataatagttcctattttccaaaattccaggaatgactccagcctccattagatggacgcaatctttctttagaaatgctaaaattgtggagggccttgatctagtcagctgttctgtctttaccagagatttgcatatctctggtttcatcctagttgatagttcctttcttagaaggcaacctcatttaaagtggctaaaatatgctgttgcccttgggtatcaacaacaaagagtcctgtaactgacatgagaccatccgcaagaagttcctgattcttcatctactgactaacccctgcccttgccccctcctctggttcctcctcagaggcctcctaaaagccttcccatcctgtaagcccccaaccccattatgcagtcagacagaactaatggttcccctcagcagtccctcccaggattataaatttatcatactcaagtattgattagtcttgacattctattagggccatttaggggcttattctcacatttattttcatttcaaaacagtgttaaaaagcaatcaataactgcctgatacctaaacaaacacccagactcattatgtcaataacctggtaaatgttttacttgctggtttccagctgccatgaggaaagatcctcccatttgccrgatgctcaaatggtgcctggaaaacagatctataaggtgcattatcctaggagggagcactayagtaaatcaacaatttcagggytgctgaatgtttcatagctattttttgtcagggaggggggtaaaggcatggtgtactggaaaaagcatggattaaacttggattcataattcacggtaagactgtaattcttactgtgtcacttactagctctgtgtagtctctagaactcagtttcctcatctatacgcaatggttaatgcaaataacaggatggagtgggcacagtggctcacacctgtaatccgagcactttggaaggccaaggcaggcggatcacctgaggtcaggagttcgagaccagcctgaccaacacggtgaaatcccatctctactaaaaatacaaaaattagccaggcatgatggtgggatcctgtagtcccagctacttgggaggctgaggcaggagaatcgcttgaacccaggaggcagaggttgcagtgaggcaagatcgtgccgttgcactccagcctcagtgacaaataacaggatggcctcccctgctagggattgttaaggtaagagatatgaaagccctttgtgtgctgttaacttcatgagccttttgtgagcttcaatgcccttgctcaaatgggcagcagagttgcttttggctggtatcatggatgatctgtgatagaagaaaaactggaacagccaattaagcagctcaactttgccttgacccagctggtcactttggacatagtatgcctgcattacttcacaggattctttggaagacagtgacataggaaacagcaaatggtttccaaggggcaagcaagtcttggagcactcaatagtataagccctttatgaagaagcaaattaaggacatttgttcttcttctgcctgggtaatatcagccacagcaacaagcactgacagaaaaggaaaaaaagaaaagaaaaagaaaaaaaaaagagagaaacagtggagaaaccatgtctctactaaaaatataaaaataagcggggtatggcggcgcgctcctgtaatcccagctacttgggaggctgaggcaggagaactgcttgaacccgggaggcggaggttgcagcgagccaagatcccgccactgctctccagcctgggcgacagagcaagactccgtctcaaaggaaaaaaaacatttagtcatctactgataatatgagccacccaacccaaccctcatgtgcccagtctggcagcagaagacccctgcagtctgaccttgaactggtcacttcagtttcccgtcctcttcatcagttcaactagggacactaagagagccctccttcggtggttatcttgtcagcatcaagtgaggtaatacatttgaaagaatttggtaaatagtatctgtttacaaagctgtatgcatgtgaatgatcaacattatttacagtaagtttgtgagataaatacgaaggaaacccgatgatagtccattttttggccctactaggcaaaggcagaaatttctgtttaagcagaaccggggtgggtggggccttccagtaactaatgcagccccagagagagggtcttagatcaggatctagagcacaacagctttggtattttggatttgagtcctgcctactgtcagtgacaatttacataatcctaggcaatttatttaatctgtttaagcctccgcgtatcttctgtaaaatgagaataataatagcacatacctcacagggttgttatgttgattatttgagataatgcacttaaaacaatttgcacaatgccggctcagtacaawgttagatgtactttgggtaggctggaggaggaaaaagggagtggatgtattaactggtaatttagttctgttttgctccctgccatggcttgttctcacctaaggaagtatttaaaaattacacatatttgcaagtactggaacatcatatggaagatgagagttggtattgctacttatggtggagagatagggaagtgattgcttttcctttatcttttgtcacaatgttgtttgcacaaaggatacagctttgttttgttttgttttaatttaaaactaaaatacaagacttgccctgaaatgtagtagcagttggctctgaaaatgccttaaagtggggaagtctttgaaaggtagagacagaaatctgtagcttgcaggaagagaagtcagaaagataatattaaagtgatacattcccattgcacttgaaatatgggccaggcacggtggcttacgcctgtattaccagcactttggaaggccgaggcgggcggatcacctgaggtcgggagttcgagaccagcctgaccaccatgaagaaaccccatctctactaaaaatacaaaaatagccaggtgtggtggcacatgcctgtaatcccagctacttgggaagctgaggcaggagaattgcttaaacccgggaggtggaggttgcggtgagccaagatcgcgccactgcactccagcctgtgcagcaagagtgaaactccatctcaaaacaaaagaaaaaagaaagaaagaaaacctatgaacctcactgaggcctaaaagtagttccatgaatatagaagatactcaaggtaggactgagctgttgttacctttcgccttccagttgcctttccccctgcctcctgggccagcaagcattctggtgtccagctctcctggcctctctcaacactgcctgccatgctctgccagctacttccgtgtttgcaactcaggtctctgctcatgttatctacttctaaaataccttggcattctatctcattatcctttttattttcttttatttatttatttatttttttttgagatgaagtctgactcttgttgcccaggctggagtgcaatgtcacaacctcggctcactgcaacctccgcctcctgggttcaagcaattctcctgcctcagcctcctgagtacctgggattacaggcatgcgccaccacacccagctaattttgtatttttagtagagacggggtttttccatgttggtcaggctggtctcgaactcccaacctcaggtgatctgcccacttcggcctcccaaagtgctaggattacaagtgtgagccacagtgcccagcccctttttattttcttcgtacktatacactgtcacacattatctcatttgcttacattttgctgtgtttacccatttatttacgtgtttgctttctttagaatacagtagctcccccttattggaggctttgccttcttcagtttcagctaccggaggtcagcaaaggtctgaaaatactaaatgaaatattccagctttggagacttcagtgccatccagagcctcttgccaccagctatagtcaaccccaccatattctttgacatcgtggtccacgggccacgtctccttcaggctgtttgcagacaaaattccgaaaacagcagaaaactttcatgctctcaacactggagagaaaggatttggttataagggttcctgaattcatagaattattctacagtttatgagttagggtggtgacttcacatgccataatgacactggtggcaaattcatctatggggagaaatttgatgatgagaacctcatccggaagcacaaaggtcctggtatcttgtccatggcaaatgctggacccaacacaaaaggcttccagtttttcatgtgcaccaccaagactgagtggtcrgatggcaagcacgtggtctttgacaaggtgaaggacagcatggatatcatggatgccatggagcactcttagtctaggaatggcaagaccagcaagaagatccccattgctggctaataaatttgacttgtgttttatcttaaccaccagaccattccttctgtatttcaggtgagtacccctccacctcatttgctcacactatcctctgatctttgtgctctcactgcagttcctgggttccatatcttccttattgccttccatgtctagctggattgcagagttaagtttatgatggtgaaatcaaagctaaataacataaaaaaaaaaaaaaggagaagaaatattcaaaggccaggcatggtggctcatgcctatgataccagcactttggaaggctgaggcaagaggatcatttgagcccaggagtttcagaccagcctatgcaatagagcaagacctcatctttaaaaacgaacaataaataagtaaataaatatttactttttaaaaataacaaaaagaaacattctggaaataattcatgttttaaattgcacacaattctgagtagcgtgatgaaatctctcactatcccactctgtccggcgaggacatgaatcattcctttgtccactgcattgacacaggctacacacccattagccacttagtagctgtctgcatgatccattagactgctgtggtaactcagtgcttgtgttcaagtcatccttaatttacttaacaatgtccccaaagagcaagaatggtgatgctgacagtctaaatatgccaaacataagctgtaaagtgcttcctttaagttagtctcttactgtgcctaatttataaattacacttttatctttttatttatttatttatttatttttgagacagagtctcactatgttggtcaggctggtctcaaactccagacttcaagttatccacctgcctcgccctcccaaagtgctgggattacaggcgtgagccaccacrcttgacctagaagccacttagatctgatgcctgggctttagagtggcagcggatataagagcaatggtccatgtcttttctaaataaaaaaccaaaagacaaaatttagcttaagggaatgaaaatcttaggaaatctcatagctcactttgatttaacccacatttactgggccaagtcccatagcaagatgaacaagattcagagtgtattcctcatagggtaaatatgactagaatgggaatcatgaataaaaagcagaatgggaaaagagtaataaggtaccagcaataaattcttcgggagcatggagcaaagattcagaagccccatctaaagtgaactctaaggagactttggccttccctttctgtcaaggtgaaagtgcaacctgtgaaaagtgaaatccacaacagaaactgcccgtgaggtcatcttaccagcctcccctgctctcacggtcaagatagctccttaatgtctgacatctttttctcagcattgcaaacagtggcaggcctgggggcagatgggcaaactgccttgctgtttgcagaaaggaggacaagatcttgaaccacttagttcttcaagaggaacaagtagttctgaccacatcttgggttgttctagaggctgctaggaaagaaatgaaacttctgcttacactggcaggtgaaggtgaagcactgaactccaagagaaaataccctagtgcctctttttatttatttttatttttatttgatttttatagagacagggagtctcactacgttgctcaggctggtcttgaactgctaggctcaaaggatcctccatcctcggctgcccaaagtgctggaattacaggcctgggccactgtgcctggccaagtgtctccttttagcaatgagcctgctgttgcaagggttgtgtgcttatgagcttttgtggacccttttacaattaaaaaaaaaaaaagtcccttctaacctaccatgttagaagtgccactgtttacacagcagaacctggaggttcatctccatgaagtggtttgtggaaaagctagagctgtgggatccacatgtctcggctcagtcctgtgccactcgctattttacttaagcaactctttccccttctgagcctcagtttcctcatcttccatctgaggaactggatgagagtagtgtctttcaaactgcaaattttgatccattcataaataataaaatcaatctagtgggttgcaaccttttcttttttttgagatggagtctcgctctgttgcctagactagagtgtaatgccgtgatctcagctcactgcaacctccgcctgccaggttcaagtgattttcctgcctcagcctcctgagtagctgggattacaggcacccaccatcatgcctagctaattttcgtattttgtagagatggggtttcaccacgttggccaggctggtcttgaactcttgacctcaggtgatccacctgtctcgccctcccaaagtgctgggatcacaggcgtgagcctctgtgcctgacctgcaaccattttttttaaaatggagaaatagaatagtttagaatacaaaatgccagggtgcattacagttaataagtattgtcttgtgaaatgtttgttttatccataaacacatattactaacatcaacacaaaatgtatttttcactgttagtcattctgaaaaaaaaaaagaaaagaaaagaaaaaaagctcaaaacataccatatcgagttttcagggctcttaagcagagacagaccratcaataggttggcactactccttgcttaattgcctatttcccattgtttgcctgaggactgagcctggctccaagtgaacatgccatttggcttctctctctaactgtggacacagtgacctagaaaaggagatgctcaatgctgcatttattgtccagcatgacatcagccagaaagcattgtgaaaataataatattatgattattgagtgaaggcctgttatgtgccagattttgtgttaagtgatttaaatatagtaaagttcattcttacaacaaggtgtctgttgtttaaggtgtatgtgattgtcctcatttttcagaaaaggaaactgaggcacggagaagttttggtgtggcattccaaggtcatagaatgggtaaatggccaaggtagaattggagcccttatctgtctgtctctagagtcctttccattacacactttttccaggctgagatgctttgcaataaagtggctttgaaatagcagttcccttcacgttgtgtaagtaaccaagtcctcccctgactggctgtggctctggctgtgacctacaggtggtggaatggagttggtttacatttctaaggaagtaatcaaattacctttcctgggctgggggcgtctcagaaggactgaattaaactgaaggtctaatctggggacattctttttttcttttttgacatggagtcttgctctgtcgcccaggctgaagtgcagttcagctgtctcagcttactgcaacctctgccccccgggttcaagcgattcttctgcctcagcctctcaagtagctgggattacaggcatgagccaccacgcccggccagtttggggacattcttattgcacaaaatttcttccagaacatttggtcctttgggatttccccagattgccaacaattagacagaaaattccaactctccttccctggttgcttcatagtatctaccatttcccccgccccccaccttacctatgagtatacctctctcgtgggctgcattggtaataccttactatccagggaatcctgggtttttggagttttttaaattgttgttttaacaaatataacttcatttcactacttctttggtgaggccacgtccaaccaatgacgttggttagtaacttgttcagtgtccccaagaacagacgataaagagatcaacatatcaacttttcttatattagaggttttagagattttttaattcaacatccagattacaatacacccactatcccagtgttctaaggaaatcagtcagggcttaaattaaacttaaatcttgtttcacatttaaaatacaatttagcgcattagtttcatatgtttctattttctagcctaaaaaacactaacagctccttgaccacagtagttgaaatcctacttagcactcaataaccaacacaacttctccaacccccaggcaaggcaaattcagtggtcctttggcacccactatgctttgcaaaatgttgaaggcttgactctccatccttttccatcccccattacctaccctccatccctgaacttaccccagggcagtagccacattgtattcttacttaccctgatatctggctcccacaccaatgcaggatgagattccctgcatatgttaagccttcagtgtatgttgtcacattgaattaatttttaagttaactttgtgttgaagtataagatgcctatagaaaggcgcacactggtgtctgaatcctcacaaagtgaaagataacatacatccagtaccccagaagccctgcaccatagcccaccatcctcaaatgtcattactttcctaacttgtaatgccatagagtagctttactagtttatgaacttgttataaatgaaattacaacatgaactctcttggtttgggtttactgcattaaacactatgttggccagctttagccatggttttgttttgttttgttttgagatgaagtctcgcttggtctcccagactagagtgccgtggcgcaatctctgctcactacaacctctgactcccgggttcaagcaatcctcctgcctcagcctctggagtagctgggattacaggtacacaccaccatgcccggctaatttttgtatttttagtagagatgggatttcaccatgttggccaggctggtctcatctgacctcggatgatccgcctgcctcggcctcccaaagtgctgggatgacaggcgtgagccaccgcgcccggcctacaccagttatttatgtattcattctactgtgggtggacatttgggttgtttctaatttggggctcttatgaatagagttgctatgaatattctttgtatatttctttctgttaggtatttacttaagagtacaattgttcagctttagtggatactgccaaatggttttaaaggtgattgtggaagttgacaagctgattctaaaatgtatatgaaaatagaaagggccaaaaaacatccagacaatcttgaagaacaaggctgcaagtcttacagtactatgtattataaaactacagtaattacgacagtgtggtgttggcacaaataagccaaaggattggaagagagaatccggaagcagattcacaattataagctacccgatttacaatataggtgacattgcaatgcagacaagaaaggacgatgttttcaataaatggagccagatcgattggataaacaaatttaaaaaaaaaaaagcttaaccacacattaaaatcaattccagatgggttacagatctgaatgttagaatgtttaaaagtaaaacaataaggctttgtaaatatgtctattaaatagaacataaaaagtactaaccataaagagaaaacttgataaatttaactactttagaaatgagaactgttcatcaaaggacaccactaagaaattgaaaacagccacgtacggtggctcccgcctgtaatcccagcactttgggaggccgaggcgggcagatcacgaggtcaagaaatcgaggccatcctggtcaacatggtgaaaccccgtctctactaaaaaaatacaaacattagctgggcgtggtggcatgtgcctgtagtcccagctgctggggaggctgaggcaggagaatcacttgaacccgggaggcagaggttgcagtgagcagagatcatgccactgcactccagcctggcgacaagagtgagactccgtctcaaaaaaaaaaaaaaaaaaaaaaaaaaagatagacaacccaatagaaaaaaaatgggcaaaa

SEQ ID NO: 94007 - DNA, 12939 bp, Homo sapiens
aactgtctgatctttttcaactttggagatggaataagttaataatttgcttaacttaaaaaacttttttttcttcctgccttcctccctcccttccttcctccctcccttcctcccattcactcttctttcccttttgttgttttttcttctttctcatattgatctcttttgccacgtgcatgcaaagcagcccttttgactgctgtgcagatgaacagttattagaatgtagttctgtgattataccatatagtcaacttgtagagttcttagttgatataatgcctagccaaataagtttcagaaataaaagataaattgtcaaaggaatgagattaattgaaaaccaccatgattctggttgcatgtattcccaccctatcttttcagtcacagtatgtactcatttccaaaaggtaatcaagatccgaaatgttcatatatttgttataaattttaaaaggacttagctatttctcacaggattacaagcacttattgagacactagctcatctttctttgctccacttccaaataaatttcttgcacacagctctgcagtcataaatcatcccgaagatctcaggtctggagtcttcagagctgtagatcatcacctgaacataattctcaaatctctgggcaccactctgcatattctagccccatgttactttgacctttcctttgatgtccagaatttgttgtctccacgtgaacatgctcagtgattttctgttttcatttttggagaggaaggtgtattaatgtattcacagacaattacctttctctttccttctttctctttccttccgtttttttttttttttttttctgagacagtctctgtcacccaggctggggtacagtggtgcgatcttggctcactgcaaccttcacctcctgggttcaagcgattctcctgcctcagcctcctgagtagctgggattataggcacacgccaccacacccggctaatttttgtatttttagtagagatggggtttctccatgttggtcagacaggtcctgaactcctgaccttggcctcccaaagtgctgggattacaggtatgaccgcccttggccctctttttcttttcttttctttttttttttttttttttttgagatggagctctgtcaccaggctggagtgcagtggtgcaatctcggctcactgcaagctccgcctcccgggttcaattgactctcctgcctcagcctcccgagtagctgggactacaggcatgtgccatcatgcccagctaatttttgtatttttagtagacatggggtttcaccatgttggccaggatggtatcgatctcttgacctcatgatctgcctgccttggcctcccaaagtgctgggattacaggcacaagccaccgcgctcggcctacatttctttttcagtaataatttctattcatgaattactatgaggcatccactgttttggcacaatcttttaatgaacttagagttataaaacagatgagctagaaggggtcttaagagaccctctgatccagccctctgccttttagcattcgtcatagccttttctctttgggaaaattggatgatttatttgtttctgccacacctgatcagcatgcagtttagtgcaaaaaaagttcaaactagtttaagaagaagtgggctttggtcagaggaaaggccatatactttatgtcaaaggaaatggatgttgggagtagatgagcatatatcacaggtctgaacaacatgtttccccagggtggactggaattccagtggttcatgatcctgtcaaactcaagtggttgagagaaatgggctccagatttcctctgttacaacagaaacttgcagatactagtccgtgttaaaatgagaaatagtaggacctcggttttctctcttgtaaattattattcaggaaggaaaataaagattattgatcattgggttacagcttcaaaaggaacaggtgttctgtggagaaatcagtttgattttgtgtggaaaagcagaccatcccgggagcgatggtgctaatacctgctaagccacgtggtaaaagaaagcaaattcgttagccatatgggatcagtcaagggaatctgattgtttataaaggtcttggtgtcagtccaggactatttgatagggtctctagtacctgacgctgaggtcttttatgcatttcttgcacatttaccatctgcttcagcctgtgtttttggagttaatttatttcacatggaagaaaccttagagagcatctggcctcttgttggcctattaatgtacctttaagggccagaaactgatgtaaatgtgtaacactgctaggtatagaagagagaaagtgggggactaggctggactggagggtgatacacccacacacacacacacacaatgcatgtctaagcttgtatggagccagatttgaaccataggccacaacttagcaatgattaagcctctaatccccttattttatagacagagaaactgaggtcacctgtatggttgatggcaaagctgggaatagaatctctgtctcccaaccgggaggtttaggggattgtgtataagacgtatgtacaaaacacagtcatgagagcatgttatcaccccaaaatactgtcacttggtgtggctggtgtgcaggcttcagagagagagagaaaagtgataggagaggggctagagatggagccagcggctggaccctgaagagtcttctctgccattgagtttggacccaatcctgggaaaaaaaccaaaacaaaacaaagctcgggaagccactagattttaatatagaaacttgtccctgagggaatgctacaaggagggactacttcaccattggccaaccccatagagtgtgacaggcgaagtcacccttaggccaggctaggaggccaattttcagagggtgttctcttctcttcacagactttgttcagcccctcaggccagtgcacaggctcagtctccactatgccagcggagttagacactgaacccaatgcgcaagcaatcttccttgctggtagtgttgggcagaagggctgctgggggatgagaatatcacagatcatagctaatattcttgaaattagaagcagacaactttaaagattcattggtcttaaagagatgatctatctaaataatttattatccagaggtgaaaattctccgaattcattttctaaggatctcattattcaaagtgttcttattgcctccatcctaaaataatgttcttttttagggataactttatttactataaggagaattataaaagtaaatttacaggaaaatggcaaagtatgaattgtataagaatgtcacaacctctgtctcttatttagtgttactctcttgcagtttggatgacaagaaaccatggcttaaggtaaagtgattaaaggttccccaggagctccagctgtcagtgtagggacagcctttctcatcatggattttctctttccatacttaaaatgtgttcctctttttattctttgtccactgtgggcagacatctgtgaataatgggggaaatgcttataaccaccatgggcagcattctatgacctaatcaatttgcggaaatttcagtggttaattagtaccaaagaaatagcaagcatatctgggccatcatttacaagaaaacactgccttttttttttgtttgtttgagagagtgttgctctgtcgcccaggctggagtgcagtgacacgatctcggctcactgcaacctctgcttcccaggttcaagcaattctcctgccttggcctcccgagtagctgggattacaggcacatgccaccacgcctggctaatgtttttgtattttttgtatttttttttttttttgagacagagtcctgctctgttgcccaggctggagtgcaggggcatgatctctgctcactgcaagctccgcttcccggattcacaccattctcctgcctcggcctccctagtagctgggactacgggcgcccaccagcacgcccgggctaaatttttttgtgtttttagtaaagacggggtttcaccatgttagccaggatggtctcaatctcctgacctcgtgatctgcccgccttggcctcccaaagtgctgggattacaggtgtgagccaccacgcttggcccaaaaacactgctttatgggagattataggttatttttttcttctccataaaaagttatgatgagaataaaaatgtcttctaaatttgcctttttttttttcttgagatggagttttgttcttgttgcccaggctggagtgtagtggcacaatttcagctcattgcaacctccgcctcccgggtccaagggattcccctgtctcagcctcccatgtagctgggattacagacacccgccaccatgctgagctaatttttgtagttttagtagagacggggtttcaccatgttggccaagctggtctcgaactcctgacctcaggtgatctgcccacctcggcctcccaaagtgcagggattacaggcataagccaccgtgcccagcctaaatttgccctttctaagacttgctataagcactctttctatataggtcctgttatttgactttatgggatctcctacctattgatctctgcattaaccctacctgtgagacgctgtgtctttacctttctcttgaatttggcttagattttactgcccattgttccaatatcactcttgctcactcccttgtcagtcttctttagttgcacctgaactgatgagtggttcctaactgctgctgcacattactgggaaacttcctcagaacacaaatgtcctggccaaccatcaggtttatggagcctggaatcttagggacatagtccatgcatgtgtgtgagtgttcccaaaaaattcccagtgtgattctgacacaaatcccagttaaataaccactgatcctaaccaaaccctctgttggctaatctagctattttgtcatctctgtgattgcatcaagcagctgagaagtgctggggcgctatcacacacaggtgcccattgtcactacagtttcatagtcaccagcctcaactgggcactccgtgctgcccgtgcatcctaccaagtttctttaattgactggcccaccactctctataattgccatttcaaaccttccacactctttggcttctcttctcttcctctcaatttcagcagatgattttttgcttcctaagtgggaaattcacaatttattgcaatacaatttataaacctacttgtattagcacctattctcttctctcctgttccagtggaggaggaatctcttccatctaaagtgaatcctttcatgtgttctctggatcccattcctccccacctcccctaatagacaagaagcagaattcaactaatctatacatttagcttatcatcttgacttcttagggcattttacacagtttactctgtccttcttgagctcgtctgtcctttttccttagctgttgtgataatatacactctcttggtgtcttttgtaccttgctgtccctcctccaagtctttttctttttctttttttttttttttttttgagatagagtatcgctctgtcgctcaggctggagtgcagtggtgcaatctcagctcactgcaagctccgcctcctgggttcatgccattctcctgcctcagcctctcaagtagctgggactacaggcacccaccaccacgcccagctaattttttgtatttttagtaaaaatggggtttcactgtgttagccaggatggtctcgatctcctgaccttgtgatccgtccgcctcatcctcccaaagtgctgggattactggcatgagccaccacacctggcctcttccaagtctttctttactggtttttcctacctaatatttaaatattgaagtttctgtgcatgtttctgggaaggggtctgggaagcactgcatccatggccagccacctcatgctcaacaatggcaccaagatggccatcctgggactgggcatctgaatgtcccctccaggccaggtgaccaaggctgtgaaggtggcgattgatatcaggtaccgccacatccactgagcccaggtacgagaatgagaatgagataggggtggccattcaggagaagctcagggggcagatggtgaagcgtgaggagctcttcatcatsagcaaactctggtgcacataccatgggaagggcctggtgaaaggagcctgtcagaagatgctcagtgaccttaagcagggctacctggactactaccttgttcactggccagccagctttaagcgtgggaaggaatccttcccattggatgagtcaggcaacatggttcccagtgacactgacattgtggacacacgggtggccatgaagagctggtggatgaagggctggtgaaagctactggcatctccaccttcaaccatctccaggttgagaggatcttaaacaaacctgggttaaagtataagccagcagttaaccaaatggagtgccacctgtgcctcacacagaagttaatccagtactgccactctaaaggcattatggtgactgcctgtagtccccttggctctcctgacagcctctgggccaaggctgaggacccttccctcctggaggatcccaagatcaaggcaatcatagccaggtgatcatagccaggcgatccaggtttggatccggttccccaggcagaggaacttgatggtgatccccaggtctgtgataccagaatgcactgctgagtcacagactttgaaccaagcagccaggatattaccatcttattcagctacaacaagaactggagggtctgtgccttggtaagctgtgcctcttataaggattacctcttccatgcagagttttgaaggggtggatgcctgctcatccccagtgacctacacttgtttttcctgctcatttttttcttgcaaatatagcatggcctgtgtcactcagtggtggaacaacaaccactagactgagcagccagggcttttctagcttgatgttgggtctgaggagcagtgtcagtagagtagaagtctattccagtttcctctgccctcttttttgcccagctggggaaagtgtagtgtgcataccctttttttgaccaaggagaagcaaaatctacaaggtcaaaatagtgccactaacagtcacgttttgactgcttgtaacttttcagcaagacttctccttgcctaaaaaaaaaagtgctgttgtgagcttaaaaaaaaatttgacatttcttaggctgtgtactaccattttaacttccactcccccattttcttcaaactccatctttgtattattgtgtgtgtgtgtgtgtgtgtgtgttcagttataggaatttgggtgtgcaaaagtgtaaatttctttttaaaacatttctcatagtctcatttctgccgacagtagtaactcagttactttggctcagggtttctcaacctcaacactcttcacattttggacaggataattctttgttgtgaaggttgtcccacatgttttgggatgtttagcggcatccctggcctccactcataagatgccagcagcctcctgcccttcctagttgtgccaacgacaaaatgtctccagatcatatcaaatgtccctggaggtgtaaaattgtccttggttgagaaccactgcatttaccttaaactcagtctctttgggggtacctagtcattttgtttcacctcatcttccttttccttcccatctccctgggagtggtcagaggctctggaggacttatgcataaccttgacattctcagagaaacctttgatctgcaattacttctccactggcattcactgttgctgtcactcaaagcctgttctcacaacaggctcactgcaggaccattgctctgctgggttttggcgtctcccctgttgctttcccatagttcctgcctcaacattggccggtggctgtctagcttctgaaactcagcaaaatttttccgtctcaactctgactgtggctgcccatcccacagcctctactgtgagaatctccctttctcttctgcaagttgatattttagttcgctctgtgctcactcaagtccctgatcacttgcaggggctccttcaaggtggcatctgtgtatgaggtggggtctcatctcctttctccttgaacctgactcatcctttccattttagtgcagctactccatgttggcatggggtgccctggaaggcagcttcctcccagcaattcagacacaaagtcctctgctgtcttgtcttcctgcatcttcctgaaggtttccatcatcccttcttttctagggttttggacccagagggagcagcatgtggaaccctcttacagagaccacatcactaactccctttagctggttgactccccatgttctctccagctccctccctcaagtcttcttatcatctctctatattttgggacgagttcttttgcaatcagagattagactttgttgtaaaacactatgttctgagtgcttcatgtatttttccttctggagcttaagaaaccttcccccaacctccttcaaatctgtctctgccataggcctaaaacctattttggaactcaacataggctttcgagcccattattcgattctttcgttcatgctgggatttttggtgttccttcttcattgggataataagccctagcgttaaggttcggtagaaacgacagaagtactggacaataaaaagaacttgccaagaagaaaaaatatataaactattattccactacctatgactgattgtttaacttttgcacttccttttgcgaaagccctgttcagggctcaccaaatatttcatttccatcagagcttaatctttgcagaggaagaagttaatactacctattgctgactttgaatgggagtttggggatatgagggtcacagagagatgattactgcccccttcctccaaactgtggagctgaccacgccataaaacagtttcagtcatcaggaatgagctttgagaggaaccactggtgtagaactttcagtctatgtggacataaccaataaaaaatttggagggggtgtaaagtgtatgtatatgtgtttaaaatgttattggcaaagcctggttgttttactgccagtaatggtcattcattttttcccctataattctattcagcttcattctggactgattcaaataggaagccgacacgatgtcaaccaaaaatcattttaatctccaagtcccataaaacaatataaaatactcatataactcactttcctggaatgaagtttatagcaactaaagtgcttccaattttatttttagaaactggttcatgcattttacattgaattaagtctagttcttttctgtgacagttggagagatattttaaatctcagccagtgggcaaagcataatttgtttctgatctacatttttgctttgaagaaaccatcractctattaataaaacaaatgctgttttcttttccttgagaatccacaacctgcacagcctctgcttgacaatctgagacaaaataaatgtgataaaatggattttatattacaatgagccaacctgacatggaagtcaagggactggtcccgaagagtgacaattacatttactgcattccagaatcagcaatacattatggtccctgcctgcaagtgcttctgaatggaatttcaaagcccttgcagatccatatgtagcctttcaagataaactgtatatcagctggttcctaaaccgcaaaactactgcccacagacaaaagcataatttagaaaagaaactcccataaaaatacacagatgaaatataggttgaaaatggtgtgtaattactggtacattactggtcattactggtgtgttaagaatctgctctgattaaagagataataaatcttcaaggaattaaataattcttaaaaggcaaaatgacacttaatgatggatttctatgacccactaggaaaaacaaaaaaaacacattgtatgtgggtaattaaaaaaaaagtttcttgaaagacaggataaacactgactatcatatttgctacaaatgtggagatcaaataacaagtaaatctttggtaagcccctcgccgtctggaatcagctcagaaaaaacagaaaggagaattcagaaaagccacaaggatgagaactgtgggctgatagatgacaacccccaaaatacaactgctgaagaggtttagatgcaaacctcaaaccacttgtattaactaattgaccctcagcatgtgccactgatcaatcatttacatcctgactggtgagttctttttaaatgatcgtttttatggttgtatttatttttattttggaaacttgcaaacctccagaaatgctgaaagaataggaggataaaaacccttatatcctttacctacatttattgactgttgacattttatcacatttgtgatacatttgtgcactctttgtatatattcccccaatcatttgtaagtaagttgcaaatattagactcttcctgttctacatacttgagtatgtatctcctaagagcaaggacatcctctcacatagccacaatactgttatcacaccaggaaatttaacattgttataaatgtactgtcttttatacaaaacgtatttgcatttcccaaattgtttccaaaaatgttctttatagatttttttttttttctgatctaggaccatcaagaatcatgcactgcatatggttgtcctataacttttgctctttaatttagaacaagggtgagcaaacattttctgtaaagggacagatatgaatacaaatatttatatttataaataacatataataatataaatattttaagctttgcagcccataccgtctctgttgcagctgcttaactgtggtgttgtagcacaaaaacagccctagacaatatgtaaaggaacgaatgtaagtgtgtttcaataaattcatataattttcaagtgccatgaaatatgtttctaattttttccagccattaaaaaatatacaaaccatttgtagatcacaggtcatcaaaagcagtaggtggcaggatttgccctacagatcataatttgatgataacatatctaaagcaatcctctgccttttttttttaaaaggaaacattttactgaagtatatggaaatgcacacacttttaagtggagagcttgacgatttttcacaaggtgaacaggatcatgtaacacaactcagaataagaaataactgtgactttatttcatttttaaaaagttccacttatttatgttatgtatgtggattcaaaggtggttagctaagtgtgttattatagaatccttccagaaatggttttaactgttattattagagtcctcatcctctgcagtgaactgaatatctcgtcttgacaacgatcctgccttttgggccagggcagctaatatgtgtgataaagtcatgcatggaaccatttcagaaaatatgccaattcctgcagattccatgaatgatttcacccctttctgtagagctctcttccggctctccgcattacctcggagggtgcccaggcctgataggcaggaagatgctgcttaaagaatggacttaagaaaaggtagacgtcagcagggcccgggatctgggaggtctggctttgttcacaggctggagggaagccaggagccgtcatccctggtgggtaactagttgatgagaccacttaagacagttcttttaccttgtttgttgcattttatttaccatggggtgcaaaatttcttggctttgtaaaagcaaaacttggaaagtttcctttagacatgtgaatggtcacgggatctcctcctgatacggaaataagctgcctcacaagttcctagcttttctatttactccaggcatcttcaatatgtttataatatttttagagattatccctagtgtgaagtggggattaatccatttttttccaggacacagagccaaacatcaattagcttttctgaaaatggcagaatttcttggatgatatgtgtcctaagcatattgatatcaatatgtgtcctaagcaatcatccaagggcacataattttttttttttttttttttgagacggaatcttgctctgtcacccaggctggagtgcagtggcgcgatctcggctcactgcaagctccgcctcccgggttcacgccattctcctgcctcagcctcctgagtagctgggactacaggtgtccaccaccacgcccggctaatttttttgtatttttaatagagacggggtttcaccgtgttagccaggatggtctcaatctcctgacctcatgatccacccgcctcggcctcccaaagtgctgggattacaggcgtgagccaccgtgcctggccagacacataatttgggagaggtacaatcaaataaatggtggtctcgccttgaggctcagcatgtgggttcagttactttcacatgggtgaatttgtttgaagaagcttaatcccaggacaacgtccactgcagatttataatattctcctaggaatatcacattcatatttcagaataaagacccctctgtaggtctaactttgagagacctgaatcaacactgaagaactgaacaggctcagagccagcttcgctcctggggttctcaggccctttctttttttctactctcagacctaattttatgttaatatccatcacctccctctcccttaaactatttctacttggctgaaggcatttaactattaattcttcgattttattgaaaaatttttttctatgttcacatcccaaataat

SEQ ID NO: 94008 - DNA, 13323 bp, Homo sapiens
  misc_feature (1)...(13323): n = A,T,C or G
cttttttgtctgatattatagttttcttttggttagtgcttgcaccaaaactaaaatctatttaactcagaactttctaaacttatatgaacatagaattttatcaaggcatagtatatattaatatctcaggaaacaagtggtatatagaacacactttgcaaaatagtgatctaaaatatatatatgattattaaaggagtatacctagggggtcatagataagagagctatttagatatctccagttggggagtctattaaagcagggttaagcaaactatatcaaaggagcccaatctggcacactacctgttcttgtaaataaaattttattggaatacagctatgcccacttatatatgtaatttctataattgcttttgctctatgatggcagagttgagtagagagaccatatggctatcaaagcttaaattgtttactatctggctttttacagaaaatttggcaattattttcctgctaataattgccaaaaattattgaacacttattactttgtgggctcaatatgttgctagatattttatgtagataatctcattttattatcctaaaaatcttttaaggtaggtgagatgagattgtgtttattttacaaatgaggaaactaaggtgcagagaaattaaataattgcccatggttacatatctagcaaatgtcagaaccagggtttgaagctagatctgcctcctagccttcactttctcagtatactagactgccttctggttcctgttgttttggtagagtgtgaagtaatggaacaaaaagttaagaaagttaaaaaactcatactttgccattgttactctaagaggttagctatgttaagtatacctgttaagtgccagggtactgtactaattgctttacatgttatctcattcaattttagcaatgaatctgtgttgcattttatagataaggaaattgaagttatttatcaaggaaaaagtagttaatctatctcagaccatactttcagaggaatattgctgatttaaagatagttagataactctattgactatgtctattatataatacagtagatacataccataaatgtttcctcatgctgttgtctaggattccaaataaaagttttaataaccacatcatgacataatattatgcctagtgagtgggctgtattttaaactttcccttatttttggatgtaggatatagaactcacattattaattagaagatttacttgcatgttaatgacaatttagaaaatactctgaatgttgctgaagattgtgacctttgcaagtgtgaactctgtataaaatagtagaactgcatacttttttttgcttaatttattttttccaatttcaaatgttcagcattaaggaaatttagaaaaatgtgaaaaatggaaagtgtttacctattgtcccatgcccaatggcagcctttgttaacagcttattcctctcagtccttttcctaagaacatagtcttttattattttttaaaaagtgtgtgaatataatttttatcccccctttttggctttacatcatgtacctagtgatggaaaactctgacttaaaatgaaagctctgtcagcaacttgtcatgtggtcctaagtgagttgtatgtctgtttccttgcctgtaaacttgggcacatttcactgtgctatccctgatatttttacttagaatgtgaggcaacctctgaggctaggccagatcttgtctggactttaaagtggaatcttcaaattgttatgaagaagatacagtaaaatgataagcaggatctctccacgtgatcctctttgtttctttgtttttgagagtgagcaaaagacctaaggtaaggttgagaaggactaacctgtagtgtgcaactaagctcctagtgggtctacagtgtttatttgttaggtgtgataatgtggtagcattactaaagtcacaactgtagggtcttgtacccttaaggcattcctctttaaaaagtggatgactatactagccaccacatcacctaagatgtgacttgagctcatttcatctgagtcttagggaaaaagcaaaaagggaaatacatttatggaaggcataccccatctaggaagcattttcatatatcaaatccccacaaaaactttgggaggtaaatgttaacatcctcatctttaaaagtatttttttttattttagaaagtgagattatatagttttacaatctgctttcttctctttacacatttcatgcaaagctgtaattatttgtcttctttactaggctgtgaactccttgaagtcaccaactctactgcattcatttttgttttctcagggcttaacacagtgcctggcacagagtaaacatccagtaagtgatgagtaaggatgatttactctaggaattgggactcttagataattagcccatagttatcaaatctttatttttcttttgtttcagcatctctcttccttttaatttctaccgtgaatttagaaatgcttgaaaaatgtaaagtgccacatacatgcaagttgagactatgttgactctctgtattcccataagttgttctggtctgtatccagttgataatgcagttgttatttttatagtagtctaagtacatatttgcacaacaggckgtgtcaactcatctaagttacttgctgttatttgcctgatacttttaaattacagagctccattactgaagtcattatttgtggttaagagggagtggtactgagagtggtaacaagaagacttttaaaaaatgaggattaaaattgaccatctttagctgcctttaaatttatcttgatttaattatctagaacaagtacaaataatggccctgccttagttttttctatacgtctgctctatacaaaatacgctgattaaaaagaggtatggacttaaaaattagaatttatttgcaagattttgttaaatgattgctttttaaatctctgccactctactgttactccattttgtgagcagaactcaggaagagaaaactcagcaaggataggaatcctctcctctttctggatatgatagtgcactgcaaatgcaagactcttctaactatggcatctatcttacaatgaatccaaatggtcattcctggaggtctgggattatgctttgttgtcctatatccctagaaattcctattcatgccattcatcctgtgggctctcagaaatattaattgaattgctgaagacttgcttgtatctttatctcagatttttaaaaaaagcaccctgcaataactaagacttaattttttagctaaattccatgtctagtttctaatacctccttatattttaaaaaatcattattttattgttaaaaaacagaaactccaaaatcattgagaatcttttctgtaaaataagacattttacagagttacaaaattttcatttttccatacaagtttttgtgagcatgcccacatttagcacagttactctttagcccgggagtttttgaattttagtgtgctaggaattacctgaggacaatgcttaaaattagattcatgggccaattctcagtatcatagaattgattggtttgtgtggagctctaataatctttaaaattattttctttttttaaatttttattttattattattatactttaagttttagggtacatgtgcacatttaattttgagatggagtctcgctctgtcacccaggccagagtgcagtggcgcaatcttggttcactgctgcctctgcctcccaggttcaagtgattcttctgcctcagcctcctgagtagccgggactatcatgctcggccaatctttgtatttttagtagagatggggtttcaccatgttggccaggctggtctcaaacttctgacctcaagtgattcgcccaccttggcctcccaaggtgttgggattacaggcgtgagccaccgcacccagccacaatttttttattttaataagcactctaggcatttctaatataggtagtctgtggattatgttttgataatgactttttttctccagtcctactcatacaggaccctctttgcctttttaaaaactattattaagttgttatctctgaaatcagacaggctataagaaaaaaaagatcttaaaaaagacaataataggtgttatttcaaagaagtgtattttgataagaaaagcaaggggcatgaaggaataaaggagaacaagattatgaagtgaaaagttacaaaatatattcttttttacccactgccaaatttttatttgattttggtcannnnnnnnnnnnnnnnnnnnnnnnnnnnnnnnnnnnnnnnnnnnnnnnnnnnnnnnnnnnnnnnnnnnnnnnnnnnnnnnnnnnnnnnnnnnnnnnnnnnnnnnnnnnnnnnnnnnnnnnnnnnnnnnnnnnnnnnnnnnnnnnnnnnnnnnnnnnnnnnnnnnnnnnnnnnnnnnnnnnnnnnnnnnnnnnnnnnnnnnnnnnnnnnnnnnnnnnnnnnnnnnnnnnnnnnnnnnnnnnnnnnnnnnnnnnnnnnnnnnnnnnnnnnnnnnnnnnnnnnnnnnnnnnnnnnnnnnnnnnnnnnnnnnnnnnnnnnnnnnnnnnnnnnnnnnnnnnnnnnnnnnnnnnnnnnnnnnnnnnnnnnnnnnnnnnnnnnnnnnnnnnnnnnnnnnnnnnnnnnnnnnnnnnnnnnnnnnnnnnnnnnnnnnnnnnnnnnnnnnnnnnnnnnnnnnnnnnnnnnnnnnnnnnnnnnnnnnnnnnnnnnnnnnnnnnnnnnnnnnnnnnnnnnnnnnnnnnnnnnnnnnnnnnnnnnnnnnnnnnnnnnnnnnnnnnnnnnnnnnnnnnnnnnnnnnnnnnnnnnnnnnnnnnnnnnnnnnnnnnnnnnnnnnnnnnnnnnnnnnnnnnnnnnnnnnnnnnnnnnnnnnnnnnnnnnnnnnnnnnnnnnnnnnnnncaacctctgcctccagggttcaagcgattcttctgcctcagcctcccgagtagctgggattatagccacgtgccaccatgcccagcttattttttgtatctttagtagagacagggtttcaccatgttggccaggctggtctcaaactcctgacctcatgacttgcccaccctggcctcccaaagtgctgggattacaggtgtaagccactgcacctggcagcctggctaatttttaaatttcttttgtagagacgggggtctcactttgttgtccaggccggttttgaactcctcaccttaaacgaccctcccactttggcatcccaaagtggtgggataacaggtgtgaatcactgcacctggccctcattttttttgttttgttttgtgtagacactatttttatgctgaccacctttgttcatagatagctcttattgaattattctttcaggagagcagtaaagtgttggcagttgtaaaaatgtgtcaaatttatgcaatcctatctctgatttacaattcagttacacatgttggcagaggtgaactggtgggcctaaggaaatgccacaataattcctcctctcttgacccagaaatgtcttgatcctgaccatataatttattaaagtaggcttagggtatgttacatgaaagtgtaaaggtattcttcctagtgggtgtgaatagtatacattttaaaaaaatgtaaactcctggtccactcaaggagattttggtttaggaggtctagagtggggcccagaaatttgaactttataaaagctttttaggtgattgtataatcagctaagttttggtacaacgttcaactctataagaattctttccacaacattcttggtaaagagtcatgcagtctcaactttgacaacttctatttgatgatgcaacttatttcattgctttaaaagatttatcttggactgaactaggcacggttctgggtgggagtctggggagcgcagcagccatggccagccacttcgtgctcagcaacggtgccaggatgtccatcctggggctgggcacctggaagccccctccacgccaggtgactgaggctgtgaaggtggccattgatgtcaggtactgccatctcgactgtgcccatgtgtaccagaatgagaatgaggtggaggtggccattcaggagaagctcagggagcaggtggtgaagtgcgaggagctcttcattgtcagtaagctgtggtgcatgtaccatgagaagggcctggttaaaggagcctgccagaagatgcttagtgacatgaagctggactacctggatccttaccttattcactggccaactggctttaagcctgggagggaattttccccattggatgagtcgggcaatgtggttcccagtgacaccaacattctggacacatgggcagccatggaggagctggtggatgaagggctggtgaaagctattggcatctccaacttcaaccatttccaggtggagaggatcttaaataaacctggcttaaaggataagcctgcagttaaccagattgagtgtcacctgtacctcattcaggagaagttaagtccaaaggcattgtggtgactgcctacagccscctcggctctcccgacaggccctgggccaagcccgaggaccttgcctcctggaggatcccaggatcaaggtgatcacagccaagcacaataaaactacagcccaggtcctgatctggctccccatgcagaggaacttggtggtgatccccaagtctgtgacaccagaatgcatttgctgagaacgttaaggtctttaactttgaactgagcagccaggatatgaccacctcactcaactacaacaggaactggagggtctgtgccttggtgagctgtgcctcccacaaggattaccccttccatgaagagttttgaagctgtggttgcctgcttgtccctaagtgacctatacctgtgtttcctgcctcatttttttcattgcaaatgtagtatagcctgtgtcactcagcagtgggacagcaaactgtagagtggccagcgagggtgtgtccagcttgatgttggatctgaggagccctgtcagtagaatagaggtctcttccagtttgctttgcccttctttttgccctgctggggaaagtacaacctgaatacccttttctgaccaaagggaagcaaaatctaccaggttaaagtagtgccactaacagttgagttttaactgcttgkaactgtaatcctttcagcaagacttctctttgcctcaaataaaaagtgcttttgtgaacttgaaaaaaaaaagatttatcttggactgaactaaaacctaccactttgtaatttccacccacaagtattgttctttctttgggaaggaggaaagagaaactaattttaatcagcatttactatattatacttgctgtgctaggtataattgcctcttatttgtatgcttgaaaaaactaaggtaatttccttggctgcaaaatggagtatcagagtagatcagtggttatcaaaatgtggtctgtggacactggagatccctgagaccctttcacagggtgtgttgtcaaaactattttcatcgtaatgggaaattgctagttgcttttttcactgtattgacatttgcattgaggatgcatagcaattttgggttaaaactgctggtgccttagcacacattaagacagtggcaccaaatgatattagtagtcattgaattctttattattaccactcacgaaacaaacaaacaaacaaacaaaaaggcagtttcacttaaaagcattgtagatgaaacagtaaaaattttaattttattaactcttgacccttctttaatactctgtgtgctgaaatgtgaagtatgtataaggcacttacactacatactcaagtatgatggttatcttgaggaaaatcacttataattgagttgaactaactacttttttcaaagaacaccattttttacttgaaagaacaactaacaaacacacaatggttatttagacttaaaaacttggcagacatattctcaaaaatgaacaaagtgagcctgcctattttgtagaaaacaagtgacacttttttgtcaataaaatttgagcttccaagagcaaattagtagtttgcaaagcttttacccaccaccacaatcatgatcgcttcccagtacttaaaaatgtttctgataagatagggtggtggatattaagaaacgtggttttaacaatattgcataataaaatatgtcaatgttttaaactcagtgagccaatgtttcttaaatgaactaatgtatgatgttacaaagtcatgcatggctaaaagatccatttaaaggcgatttgattttagggtaatggaatacaaaaagtttattgatattcaatttttagattccatattgcaattaacttttgagaaatgattacttgtcaaattttgatataatataaaagaatagccacaattatttgaaaaggctattaaaacattctgcctctttctaactacctatctgtgtgaaaatggatacttttcacatacttccaccaaaccaacatatcacaacagattgaatgcagtagcacctatgataatctagctgtctttttctaaaccagacatttgagagatttgcaaagatgtaaagcaatgttagttttctctctcttttttttattttggaaaatatgcttgtatttcataaaatactttataatactatgtaataggtttattattgttatttaaaataactctttaaaaactttaaagttttagtttctaatatagtaagtattgataaatgtaacaatagctctttgtgaccctcaataatttttaggactgtaagggagtcctgagaccaaagagtctgagaaccactggactcaatgatctccaagttcattccaaccaccatcattgaacatgcaaccatgctattgtaacatggtttccataaagtttcctagccattctcctctgaatgctttgtcaatgtcccttctaagtgtggccctcaataccaaaataatattgaagagatataggttgagcagcatggaatacatgaataggctattatgaggtagcttcaataataactacctttggagatctttaagaataggagaaattcctatttctttgaggaaggaagttcttccagaacagcagagtggtggactaggtagcatcttaagttgtcttccttgatacctcacaaatactctaaccttttgcattagaagacataattttctattcagtactgtgatgttttaaattattaacaactgcatttaaaaaaaatactggacattagcttaatgtcagtcctactgaaagtcaaatttcacattttattatttatagttaattcaaattctgcataatttaatatgattattaaggaaaaagaaaactaagcattatggagttcaataaacatgggtttaatctagtaaagctgcaagcaaaaaaagtgataataacagtgaagaattgaaatttttaaattgatggagctttggaggaaatagcaatagttttaatgcaacaatcacatctcctgcaaaacccacttgaatttgcatacaggatatttttaatgtgtaatttttattctgatatataaaagaccaggcatcgatattttcctaaaagttagttgagaagataaatgcgttgaagacagttgttttaattcagtggctcactatgtataatattagtaaaatcaatgcatcaataaattttaaaaagttatttaattcttgacttcagttttaatcatgcagtgctatgatttaatgtaaaagtggacaaaatttgttacaggtgttttggaagcactttagttctttaaataataccttagaatcattgagtctcagggctgtaaggtcatttaatccaaccacccatttgatacttgaactttcttgctaactcacataataaaaagaaggtggggggtggttactaaaaacagaaatgggtgtggcttaaagacagacttttaagcaggatttaaaaatgtagcttgaaagcttttaaagtctaattatacagggaggtggcaatgtttttatttgctatttacctttgatctattacctatttttggtagagtgggacatgcttttgtgaaaatgtttatggtttcttcatttgatgttaagatactcatttgaagttgccctgtaattttgagggttttttaaactaatattaatatttggcttttgctcccagactaatagcaagttatcctagatctgggtcatttcttttgaatgtctaagtgatatactgaattttagaaatatcttcctcattttggcatacattagacatgctaagtataaaaaaatctaaataatatcaaaccataagggtaataaagtaaaaagaacctatggcaccctgcccaatgttaacatttttgttaaattatattttgtgaaacttatacatgcatatatatttgattttcacataagtatttgatattctataaattgatgggcttttattatacacatattttttattcaacaatatattgtggccatcttttttgtcaataaatatagatttatataatgatttttaataattacagagtagtgttatatgtatgtagcacaatttacttattcaatcaataggttattcctaattttggctattataaaaaactgtagtgaacatacatattaaatgtatcttttatcatatttataatgagctctttaagataatttttgaaagtagcgttgaaatctcaaaggatatagacagtaaaagttttaaaacttattgtaaaagtgccattcagaaaagtcatacatttataatcccatcaatagtatatgaaagtgcttatttttccacactctcaccaataccagtttttgtccagtttataaaacgttttgccaatattatgagtgaaaacattttatttacatttctttggctatttgggaggttcctaatttttaatgtatacatttttatattattggacatttgcatttcttcatttgtacatttcttctttgtatcccttgttcttttttttttttttttaagacagagtctcactccgttgcccgggttggagtgcagtaacgcaatcttggctcactgtaacctccgcctcccaggttcaagtgattctcatgtctcagcctcctgagtagctgggattacaggtgtgcaccaccacacccggctgatttttgtattcttagtagaaatagggtttcgccatgttggccaggctggtatcaaactcctggcctcaagtgatccgcctgcctcagcctcccaaagtgttgggattacaggcatgagccacccctcttggccccttgtgcattgttatattgaagtatttgtagcaatgcattttttatttagtacattaagaatatatcaaagacttgatgactaaatattatggaacaaattaccaccatggtcagatgtgtaatagactgtgacccaggttggattattgattgtttgaaatccttgatgggaaaggccattattttttttaatttaaatttttgtgttcttactgtccagtgtgatctttaacccatggtcactcttcgctgaatgtataaatgagcaaatagagaactggaacaatccatgggtgattaggcgttctgaggattcattttaccaaacagattgagattttccagaacacgtaatgatttgctctggcatttccttctctatcttttcacatttgtsctgccatcaggaccatagtgactgcttttgtttttggaaatgtctttttaagactaaacttttctagttcttaaaaaggtacctatttcaagttgtgtatatattaattcttaactctttgcccctcataaaatgttgcttgtttagccttcagttaactgcatgcagaactatgcattaaagtcatttttaaaattatataatgatgaactctttgaccataggaacttattattttttaattctttgctgtaaatttcaccaatagtgcaaatccattgataatgagattcacagttgcttttaacatatgtagcacgactggactgatatgatgaataagatttattgactttgtattggtgtatgtgaaaatattatttgttctaaatgtctggaatctgacttgttccaaaattaaaaatatttctagagttagagatcttaattcaagatagttcattgattaaaaaattaaatctatgctaaccacaatattttctggtcacattttcttttagctccccattctttatgtggaagtgaaggaataggatgtatcatgtatcttgcataattccaattaatgcttttaaaaaagtagttgccagaaaaacaaggtgtggtattttaaaatgtataagtactaaaaactctttcggattcttctagaatttagacttttggatatacagcattttgctataaaatttattttgtgggtaacttctttataaggaaattataatttataactcagcgggggatagcatgtgaggatggtttgaatcagaaccagtactctttgatggttttggataatacacacagtgtgtccaggtaggcttgtctggtgtcccagataaaattactctcccagatccctaaacagcagaggcaatgaggaagaaaagggtataataccaacaattaatgacagagctagccagactgtcctgtacttcttgcactgtggaagtaggcgttagagttgctggaaactggtgaaactggagaagccctgaggcaccatttcctacaaggacaagaaggtctagtgaagaagtctaatgggtatgttagctgttgatgcttaaagctgtccaaatgcccacacctttatcatctatcaatctttaaaaagatttaaaaaaaaactttttttagagattttttagagatgttgcctaggctggtcttgaactcctggactcaagcaatccactcgcctcagcctcccaaactgttgggattacaggcgtgagccactgcacctggctctattatctataaatcttgactagaaaatagaataaattacctggatcatttaggtaaaagcatattttaggggttgaagagggctgagttagatatttatttcatattcatcttaatttcagatgcctatacctaatctattaaggtcatttgtgctataattgcaagttgggtgcagtggttcctacaaatgatgttgatcaagatccattgtttttcar

SEQ ID NO: 94009 - DNA, 28765 bp, Homo sapiens
atatttctaaagttttgtttttatagataatgctgtgataaacattgtactgtataaaatatgttctaagaattctcagtggaaggattattgggataaaggatatgaatattgtgatggtctttgatacatgttgacaagtcacttttgtaaagtagactaattgtacctttaaagaaaattcaatatctaaaaaatcctaagtccaggtttatcatcaggaatatataccttgttttgaatgttcccattttatatttgtatttattaaacagaaaactttgctatttaagagatgagacatggccgggcgcggtggctcacgcctgtaatcccagcactttgggaggccgaggcgggcggatcacgaggtcaggagatcgagaccatcctggctaacacggtgaaaccccgtctctactaaaaatacaaaaaattagccgggcgtggtggtgggcgcctgtagtcccagctactcgggaggctgaggcaggagaatggcatgaacccaagaggcggagcttgcagtgagccgggatagcgccactgcagtccagcttgggcgaaagagtgagactccgtctcaaaaaaaaaaaaaaaaaaaaaaaaaaaaagagatgagacatacggaaactgtgatgcaacattttttattacagaaggtgaattatttttggtcctccactttggatcccctttggttatcattgttacaaaatgaaataataataagccattttcacaaatcaaaatgtgtataattgatttttataaaattgtttatataagaaatggcatagataataattgttatttttactaaagtgtttaaatgttttaaatgaaattatagtctaagtaaaagcaaaactgtttactttcttatttaatcagcaaagtctggtggataaagtatctcgaagacagagacctgatatgaatatattatttctaaatatgaaagtaagacggacacatctggttagcgattcacttgatgaggtataatttattccaaaatgatattaattaaagcttaaaattctataatatgattattataaaaatcatagtaaacttttttatttctgtatgccaataagtgtgcttccttaaattcttttgaagatcttgttgcataccaagcttctgtaaagtttgataccatagttaaaatcagatctgtattcataattgtcttatattcatgtttgtatgtttattaatagtttgttaattccctagaaaaggatttgatgtagaacacttaaatgagtaattcatgtttcttagtatataacctagattccagacccacctttgttcctggttatgtgtgtaacaagtcatttaacttctccaggtctcagactacacatctataaaattagaggtctgacctacagggtatattgggtctatacaggttctaacatactttgattgcattttcatgtattatcataaaaaatgcttcagctagatcttaatatggttattagaagataatggctgattccgctatgtgatttatttatttatttatttttgtgacaagttttattttgtcacctgggctggagtgtagtggtacaatcaaagctcactgccgcctcaaactcctggtctcagggtctcaagccatactcctacctcagcctcccaaatagttgggattaccagctcatgctaccacacccagccctagctatgtgattttttaaagtttagcattgaaggggagttttttttaaaaaaagaaatgaattatattgtgctaaattaaaaatttgaaggcagtagataccaggaggtagtactttgggtgaagtacctgacctctctaattctgtttcctgatctataagacatagtaaacacctagctcacacagtgtctggcagatttattggataaatggagggatggagttttgtagcattgcaaataagttaaagactgcctaacacatttcccagaattaaaaatgttaattctcttttcactgctctttgttctcctctactgtataatatcttcaaatagctaacccggaaaagagccgatttgaaaaagaagttaaaagttacatttgtaggggaagctggtttggatatgggtggtttgactaaagaatggttccttcttctaattcgccaaatttttcatccagattatggtaagtatgtaatctaatttttataaactgtgtttcttcataattgttagagtgaagtagtcacccttatttttaacctattctgtgattttacagactttttgtccatcgtaaatgttgaataattgtttaaggactgttatttacattttaaaaacttgtttgaccgaattgttgatcagttgattctcttactgggaatcctacacaaaatgtatcaagattaaaagtaaacatttatgaggaaacatccatatcttttctgaataagtcaaatgcatgaaaatttaatttgtcattgaaataaacatttgaaattaaaacacaaaactatagtttgctctatagtaacatttaaagcctctttcattaatgggtcattttaataaataagaattcatgaattaattttttaagaaaaaataagcctttgaaattttttattttacagaaactacctgtataatccttactatctgttaaacttttcaaaggagaattttcagtgttttccttattctttagttttcttttctatatgtgtatgtgatgggaaatagggatgacagtgataaattgaagtctccagatatcctcaaaattaattttgatcataatttataatctatgaaactatactttttataaagttatctgattcatttagtttctatctttttaccctgtttctacccttggttcaggaaaataaaatgttctccatatatatttaatatatatatttatatttgctgagatttgcaaatatatagtcccataaataatccaaaatttttaacttgaaagatggtttgtaacagaattattgttgaattgattagcttctaatagatgagatgtcatgtacatgtttaccactttgatttttttaagtcaatcatgttaataataacattattcgtgtgtttttttaggcatgtttacatatcacaaggattcacactgccattggtttagcagctttaaatgtgataactattctgaattccgattggttggaattgtatcctttaaactttccactaggaggtgctaatagattagagatttttaaagattttatctgtattttagaaaactgttttctttagccattttatccaaattaaatgttattgtcaaatgtactattagattttcagtaatcttcattatgtgtaatatatgtcagtagacttaattgaaagaaatgagagtttgatttttttctgaaaaccttatctcaaaataaaaatggttctttcctatttcacatataattgaagttatcactaatttaaggcattttttaaaaaaaatcaaagtatttcccatttataatgaagtattttttttctgttctttcactttgtgctcatttccctcagtttactgaattgaaattgggggaattaaatctagctctttaatatgcctccaaatcctgaaacataaaggaagcatccataaaaattgaatggaatgggaatatttaaagcatatagtattattttatagtatttttaaaaattttataagtccatctgcaatcctatgattcctatcaggtatattgtagagggcatttctgcattgggtaggagattggacaagatgccttctacattagctttttagattccaagaaatgtaattgtttgtggaagaaaggagggaagagtaaataaataagcactggagataagaaagtataaaaggggtgggggggaattcttaatctgttctcagagtcaaatgaccatatggcagtaagtactaaggagttctgagaaggaaaatatacaatgtatttttcccagagaggatagagatttaaaaaatggaacaattacatttgattaatatatggctggtgagagtggtgggacattataagctgagagaatggtgagaataaaaaaggctaaattgtgctgggcttggtagagagcagcagcaagcgcactgaaagttatggaaaataccatcagaaaatgaatgaagagccatctttgaatgtctgtctttgttacatctgttggaataaattatgagacatatatatggaaactgagagaccagattaataaaagaaagtgtagtagggaacaaactacacattaagatagtaaactcaacttgaaattttgtatatattgttgtgtctaaaggtccaaagtgctaaattccacaaaatgaataacgcttaacaattctgagactcctgtttatattctagtatctgcagtaatcatttgttgaatgtttcatcttcattgaagggcctaatcattgatgcttgtcactatactatgagctatttatatgttcatacatatatgtttgtcatgctttatattcatatatcacaatttagatttggatgatattttgactctaatatttacactaaaatattatagcttagttacatttttaagtgatactatacataaaatcatgaaattgctcattgttttttttgcaatagatattagtttctatttagtcattacccaaaagagcatattaagcatgtttagatattctatatttcaagttaaacaattaaatctaaaaattataattgctactctcattattatgtgtgtttatcacacacacagatataaaacctatagaaagctaaattgatgctgtaaaaagcataatactatataggagaaatgtgagatgagagtggattgtggtcaggtaaggagttgggaactgaaatttgagaaagaacaggtatgaacattgagaaaatatagttggtttcatatatatctccagttttaaaatttcaggaccaaagatgtgttgttctagtagttctgacagtattgtgtttctaatacaattattttgaagtataaggccttattatcagacttcattacaccttagcaaattgaaattttggtggtcttccaatttttaaaagttattttcagtaatttacccagctcatatgtttagatttccttatgatcctataaaatgaattacttccttaataactttatataataattgactgttgaaatactatgaaatttgatctaaaacctctctttccataaatggataagttacattccaccatatgactaataaataatcctgagcaaaatttgtaacatctgtagctttttaactttgacactgaaactccaagtaacataagtctttcaagttttactgttggaaattacctatcctattagcttatcaatagcatgtttatatccatatgtttattcagtttagctctgttcttcacacatagtctgtttttaattttaaaataaataaaatggctatctccaaaatcagtattctacagtgagatctactgaataaaccattgctgctgcttataaaattgccagcatctttgtttaaatttagaaaatgttttctgtaaaataattacaggcaagtcttaagttgctgcctgttgtgatcttagataaacttttctagggaaatcattgaatactatcaactaaaccactcctttttacatgactttttgtaatcaaggaattatattatgtaaaataaaggggaaataaatgaaagaggggaaaggaaatatgtgatactaattagaaagtcagtgttaaatctgaaagaagtatgcaaaaaatagactgatgcataattcagaactcatttgttgtcatggattttatgttaatgcttaacatttagtatgcatagcttatgggactagctgtttataacagcatcaccttggatattcgtttccctccctgctgttacaagaaattattgagccctcccatcattcctagtgatcaaaatataccagtaggcatctgcaatgttaccgtggacgacttatgtcaaattatgcctgtaagtataaagttattaatatcttgtcctttaatgcgaaatcatcttttttctacctgcacagtctctcctcctaatgctattcttacttttaaatatggtttccttctacctttataactcatctccttttttcatctagctttttctttccttagagacacatgtcacccactttgcagtgctcctaagcttttacaagatagagaggcagtaattcgaatccaggctctgtcacttactagctctgtgaatttggacaagttatttaacccttcaatttagtttctttatgtgaacaatgggatagtttttattaataatttttaaatgatgacaattatatcaaatctgtgccagcctagatttgtatgaaaatttgtggttttaaaggaatagaacatttattatgtaaaatatagaaaatcattctaatcatgctattatttacctttttctaataatttaaaataaaactttaattttttcataaaaattaaattgaaaattttgaaatattggatcaatttttctatttttaaatctttatttatggataatttcaattataatataatgtaagaaaatctttcttttttttttttgagacagaatctcactctgtcacccaggctggagtgcagtggctccaccttggctcactgcaacctccgcctcctgggttcaagtgattctcgtgcctcagcctcctgagtatctgggattttaggcatgtgccmccgtgcccggcaaatttttttttttttttttttttttttttttagcagagacggggttttgccatgttggccaggctggtctcgaactcatggcctcaagtgatccgcctgcctcagcctcccaaagtgctgggattacaggcatgagccactgagcccagccagaaaatgtttctttttttttttttttttctgcccaagacagtcttgctctgttgtccaggctagaatgcagtggaacaatctcagctcactgcaacctccacctcccaggtccgagcaattctcctgcctcagcctcccgaatagctgggattacaggtgtgagccaccacacctggctattttttttttttttttttttttttttgtatttttagtagagacagggtttcaccatgttggccaggctggtcttgaactcctgaccttgtgatctgcccacctcggcctcccagagtgctgggattacaggcatgagccaccgtgcccggctaaccagaaaatgtttctttcagtatacttaactttttcttgggaggggagggcactgtgcatgtatgaactgtatattcatgaatgcacatgaatgaactgtgtgttttatgtttaaaatatgaatccaaaaacattagcagattttcataggaatataaattgaaagtgagaaatactacaaattcataaacagtaatgtggcagatagcagtgaattatgacagacactacattagaggtatgcttagcttgctgcttaagagtagaccccagagttatgcccctgtagtttgaactggatagtttccccatctatgacctataatgatttttttcttagcctctggatggtagaaatcattaaccattttgtgccctggaaaatacatgtcaaatatgatctttatatacatatgcatgagctatagaaaagccacttcattatcctagctaatgctattctattgaaaaaatcattaacagatttctttttataggagttggcccatggattaagtgaactcttatcacatgaaggcaatgttgaagaagatttctattcaacatttcaggtactattaagggcaagtagttatctgttaatcatatatttcatatatgaacagtgcaatttgttattaaatacccactgttagaaaagatgaacaaggattaaccaatacatacaatcctctgtcttaaaggaccttaacctgataaagtagacatgtgtagatgagcagtcaatgaaagtgcttaatgaaattcactaagggttcagagtactctctaggcaattacatatccccttgagttggttactttctcagagctttttagtttctaaaaataagcctctcctgtaacttcaacattagaagctaggagtagaaactaatgagtcagaccaaaactctctgatttccactccttttacagtatttgggaaatggacattacagtgatctgcagagctccagggacccgctgtgtattatctagatgtccacacagttttgtggacttcattaaagtatttaactgtattaggcagggttaagttaaggcactattttttaactccataattcttttatgatccctcgttcttaatacaaatattgcaagagcttagccttttatagtttatgtgtttagaaggaagggggaaaaaaactgttttttaaattttacaaacctgttcaccaaagtatgttattatatcaaccatattaatatgtgtaatggcatctcccatcaggtttttcaagaagaatttggaataatcaagtcctataatttaaagcccggtggtgataaaatttcagttaccaatcaaaatagaaaaggtaagttaataccctttttaattaaaatgaattagtatttgccatttacttttactatttaagagatgtaaaattgcttttcagaatatgtacagctttatactgacttccttctgaacaaatccatctataagcagtttgctgcattttattatggatttcatagtgtgtgtgcttcaaatgccctaatggtgagtttataactttaaatcaagctttcggttagcttttgtagtactatcatgttaacaaataattaataaatattttagtagataagcttttaaaatagaaaatattttctactttttaaaagtagaactaaaaacaaaaatagttctctcatttcagtcttaattctttagaggggaaaaacaccccagtcagttcattttctctccccttctactaagtcttttagagctttacaaactttctccaagtagagtggatgaagggatccatggactcaggatcttaatactgaaggacaaggcacacaacgcagttaacatgtagctccagggtaaaagttacaacttcttaatgattaaggaacatatgtatagctgcttcctgctacctcagggctccctcagcaactctgcattgccttttacccttagcaagtagtttatctctagagttatggtggactcagtttggtctgacttgtcttagccatgtgaatatggatcagctactatttagaataccatgtcagaagtatcataggatacctttcagtcaccccagctacccagcacacactttcatcatgccatttatacctcccttagtttcattatgagggattggagtaagatctttcatttgaattatttttcatgggagagagaaatggactatagaagttgctttggggcaaaaccaagtggcttacattattgccagcttgttttagagaaacctttgtaatatgtttgttgtcgaaaatacctttgaaagagaaacactttattgagctctagttaagttttgtttatgacactctggtaattgtgggagtggacagagggaaaataagaattaaatagcatagcatggtctctgtgttttagagctttaatctctgtaggcggtagactaacccacctgaaagttgaaaaaaacaagagacacaagacagactataaccaagtgcccaaactctacagtgcacacaggaggtgttatgggatattggaaggagatactaggatacgggatattaggtggatcagtagatgttggagcttcatgctggtttttggagaagagtaatttggatttgtgcaaagtaatttgcttgtttttctggcaaacrgctaattactatttacaagatctataaacttcrgaagcaaaaatatcttgccttggcaggaaaaatatacccagagtcgatttttcttcaacaaaaatggtttgatttactatgagaaatcatgacttttgtgatttgatccagtgaaaatagttccagtttcacttaaaaccatcactctttaattattgtttttgataaataattattggcagctgcttcgtccagaagaggttgaaattttggtctgtggaagtcctgacctggatatgcatgctctgcagagaagtactcagtatgatggctatgcaaaaacggayttaactataaagtgagctctttatacttctgatagtgggggatgtggagagggaacagcagacagtgtggttcatttatttgcataacttacaatctttgaatcaattaagttagtcaraatattagagagtcccacagtcttattttatctctggaaagtctatgagaattttaatatgaaatcactccctttgggagaaaattctataagcaagtttctacaaaagtgtagagattttacttttaaaaaaatgactttgctcctagaatttcatggatgctatccttgtaaataacagtttaatagcactatgttgaaaaataagacttgaaagttatgcaggagaaaaatggttcctgtactatccactgctgaacttatatacttttataaaaatattattttataatgttagtcaaaagtctaatacgtatatrgaagctcaccattccttaattttacagaaattcaggatattatgtatgcttaaggaaagtcctttccttagagcttcctttatattactttattataggatttttgtcaagacatttgatgttaatttcctttggtattctctagatacttttgggatgttgtgcttggatttcctcttgatcttcaaaagaagttgctacattttactacagggagtgacagagtacctgtaggagggatggctgatttgaactttaaaatctcaaagaatgaaacttctactaactggtaaatttctggatctaattttattttaaatctaaaggttactgctaatactgctaatgataatacatttggaatcaggatgtgtactccgtttgaagttattttcatagaaaaatcttcagagtaaacatggccttgaaatgtaagagattttgattaaaagttctcttactagtttttgagacatactaactaataattcatttctaacaactttttactttgctaggtcatataagtgctttgtagactcttttagaacctagttactttgtagtagtagattgtctaatgttcatttttatttaaatgtgaaatgtgttttttatttttaggaaaatcattaagttgggatatctggtttgtttgtggagttttctttcttttctagggggttgggggatactataattattaccagaagtacctctaatactaatcctctttttttttttaatctcatgctttttgtatatgaagtgatggtgatgatggatttaaattattttctagcagtgttaatgcattaatgcttatcaacttactccttttcccaaataacttataatttctaaagctaacttgaatagacataactttgattataatcatttttgtctcctgccccatacattgaacattccctaagtgctcttagttcttcctttcattttaaagctggaatctgttctttgcttttccactgcctctaccttggtaaagttactttttatcttcattactagcttattttatcctattaaactcatgtgctttaacactatttagatcatatttccgtgggaaataactttattgccagtttaagttctagaatccagagactgtaaaataaagctctagtcttctaccccaggctatctaccagttttcatttctttctatgctttagtcaacaggctgtttgctggttccttagatatattttatgcctttcttcctccatgctttcaagttgttccctttacatgtgatgtgccagctatgactattaaagacacagtttaatgttgacttcctctgtaaagccaaaagtcattatgtattgagtttctcaaatatcttgtagaagttatgtgctagttaccatgttgcactttatatctgagtcatttagttcttcaagaaagaggttatgccttatacatatttgtatgctccaagtaatcacacatggtaagtgcccaatagctatttcttcaatagtatttatgtcatcatcaagattatatttaaaacacaaaataaatatttacatatataattaaatttctaaacaaaatttacaattaaagtcctaaaatgaaaaaattcaagaggatttttttagattatagattttttgcataacagaagttaatttttcagaatattttattttatattaaaaacatttccaattttaaaagagtaatctgagcaatctgttttaatacaaaggtgacattacttctaaactttcccaataattattattatttcaagaatatgtgagctaacatggcttcaacatgaatctagaacctctaggattcccagtggaatctcacatatattaaataaagctgactatcaaagacatacaacatttcaatttgacataataatggtatgcctcaaaagacaaggacaacactccagctgaaagaggagtttccattcatcttataaggtccaccattgaatattcattcactagatttttgttaaataagaatggtaattccattaaaaggtgggcaaaggacatgaacagacacttttcaaaagaaggcaacatgcagccaataagcatatgaaaaaatgctcaacatcactaatcattagagaaatgcaaatcaaaaccacaatgagataccatctcacagcggtcagaatggctattgttatattaaaaagtcaaaaaatgagggaggagccaagatggccgaataggaacagctccagtctacagctcccagcctgagcgacgcagaagatgggtgatttctgcatttccatctgaggtaccgggttcatctcactagggagtgccagacagtgggcgcaggtcagtgggtgcgcacaccgtgcgcgagccgaagcagggcgaggcattgcctcactcgggaagcgcaaggggtcagggagttccctttcctaatcaaagaaaggggtgacggacagcacctggaaaatcgggtcactcccacccgaatactgcgcttttccgacgggcttaaaaaacggtgcaccacgagattatatcccgcacttggctcggagggtcctaccccacggagtctcgctgatggctagcgcagcagtctgagatcaaactgcaaggcggcagcgaggctgggggaggggcgcccaccattgcccaggcttgcttaggtaaacgaagcagccaggaagctcgaactgggtggaacccaccacagctcaaggaggcctgcctgcctctgtaggctccacctctgggggcagggcacagacaaacaaaaagacagcagtaacctctgcagacttaaatgtccctgtctgacagctttgaagagagcaggggttctcctagtacgcagctggagatctgagaacaggcagactgccgcctcaagtgggtccctgacacctgacccccgagcagcctaactgggaggcaccctccagcaggggcacactgacacctcacactgcagggtactccaacagacctgcacctgagggtcctgtctgttagaaggaaaactaacaaacagaaaggacatcyacaccaaaaacccatctgtacatcaccatcatcaaagaccaaaagtagataaaaccacaaagatggggaaaaaacagagcagaaaaactggaaactctaaaaatcagagcgcctctcctcctccaaaggaacgcagctcctcaccagcaacagaacaaagctggacggagaatgactttgacaagctgagagaagaaggcttcagatgatcaaattactctgagctacgggaggacattcaaaccaaaggcaaagaagttgaaaactttgaaaaaaatttagaagaatgtataactagaataaccaatacagagaagtgcttaaaggagctgatggagctgaaaaccaaggctcgagaaccacgtgaagaatgcagaagcctcaggagccaatgcgataaactggaagaaagggtatcagcaatggaagatgaaatgaatgaaatgaagcgagaaggaaagtttagagaaaaaagaataaaaagaaacgagcaaagcctccaagaaatatgggactatgtgaaaagaccaaatctacgtctgattggtgtacctgaaagtgacggggagaatggaaccaagttggaaaacactctgcaggatattatccaggagaacttccccaatctagcaaggcaggccaacattcagattcaggaaatacagagaacaccacaaagatactcctcgagaagagcaactccaagacacataattgtcagattcaccaaagttgaaatgaaggaaaaaatgttaagggcagccagagagaaaggtcggtttaccctcaaagagaagcccatcagactaacagcggatctcttggcagaaaccctacaagccagaagagagtggggaccaatattcaacattcttaaagaattttcaacccagaatttcatatccagccaaactaagcttcataagtgaagaagaaataaaatactttacagacaagcaaatgctgagagattttgtcaccaccaggcctgccctaaaagagctcctgaaggaagcactaaacatggaaaggaacaaccggtaccagccgctgcaaaatcatgccaaaatgtaaagaccatcgagactaggaagaaactgcatcaactaacgagcaaagtaaccagctaacatcataatgacaggatcaaattcacacataacactattaactttaaatgtaaatggactaaatgctccaattaaaagacacagactggcaaattggataaagagtcaagacccatcagtgtgctgtattcaggaaacccatctcacatgcagggacacacataggctcaaaataaagggatggaggaagatctaccaagcaaatggaaaacaaaaaaaggcaggggttgcaatcctagtctctgataaaacagactttaaaccaacaaagatcaaaagagacaaagaaggccattacatagtggtaaagggatcaattcaacaagaagagctaactatcctaaatatatatgcacccaatacaggagcacccagattcataaagcaagtcctgagtgacctacaaagagacttagactcccacacattaataatgggagactttaacaccccactgtcaacattagacagatcaacgagacagaaagtcaacaaggatacccaggaattgaactcagctccacaccaagcagacctaatagacatctacagaactctccaccccaaatcaacagaatatacatttttttcagcaccacaccacacctattccaaaattgaccacatacttggaagtaaagctctcctcagcaaatgtaaaagaacagacactataacaaactatctctcagaccacagtgcaatcaaactagaactcaggattaagaatctcactcaaagccactcaactacatggaaactgaacaacctgctcctgaatgactactgggtacataacgaaatgaaggcagaaataaagatgttctttgaaaccaacgagaacaaagatacaacataccagaatctctgggacacattcaaagcagtgtgtagagggaaatttatagcactaaatgcccacaagagaaagcaggaaagatccaaaattgacaccctaacatcacaattaaaagaactagaaaagcaagagcaaacacattcaaaagctagcagaaggcaagaaataactaaaatcagagcagaactgaaggaaatagagacacagaaaacccttcaataaactaatgaatccaggagctggttttttgaaaggatcaacaaaattgatagaccgctagcaagactaataaagaaaaaaagagagaagaatcaaatagatgcaataaaaaatgataaaggggatatcaccactgatcccacagaaatacaaactaccatcagagaatactacaaacacctctacgcaaataaactagaaaatctagaagaaatggataaattccttgatacatacactctcccaagactaaaccaggaagaagttgaatctctgaatagaccaataacaggatctgaaattgtggcaataatcaatagcttaccaaccaaaaagagtccaggaccagatggattcacagccgagttctaccagaggtacaaggaggaactggtaccattccttctgaaactattccaatcaatagaaaaagagggaatcctccctaactcattttatgaggccaacatcattctgataccaaagccgggcagagacacaaccaaaaaagagaattttagaccaatatccttgatgaacattgatgcaaaaatcctcaataaaatactggcaaaacgaatccagcagcacatcaaaaagcttctccaccatgatcaagtgggcttcatccctgggatgcaaggctggttcaatatacgcaaatcaataaatgtaatccagcatataaacagaaccaaagacaaaaaccacatgattatctcaacagatgcagaaaaggcctttgacaaaattcaacaacgcttcatgctaaaaactcccaataaattaggtattgatgggacatatttcaaaataataagagctatctatgacaaacccacagccaatatcatactgaatgggcaaaaactggaagcattccctttgaaaactggcacaagacagggatgccctctctcaccactcctattcaacatagtgttggaagttctggccagggcaattagacaggagaaggaaataaagggtattcaattaggaaaagaggaagtcaaattgtccctgtttgcagatgacatgattgtatatctagaaaaccccattgtctcagcccaaaatctccttaagctgataagcaacttcagcaaagtctcaggatacaaaatcagtgtgcaaaaatcacaagcattcttatacaccaataacagacaaacagccaaatcatgagtgaactcccattcacaactgcttcaaagagaataaaatacttaggaatccaacttacaagggatgtgaaggacctcttcaaggagaactacaaaccgctgctcaaggaaataaaagaggatacaaacaaatggaagaacattccatgctcatgggtaggaagaatcaatatcgtgaaaatggccatactgcccaaggtaatttacagattcaatgccatccccatcaagctaccaatgcctttcttcacagaattggaaaaaactactttaaagttcatatggaaccaaaaaagagcccgcatcgccaagtcaatcctaagccaaaagaacaaagctggaggcatcacactacctgacttcaaactatactacaaggctacagtaaccaaaacagcatggtactggtaccaaaacagagatatagatcagtggaacagaacagagccctcagaaataatgccgcatatgtacaactatctgatctttgacaaacctgagaaaaacaagcaatggggaaaggattccctatttaataaatggtgctgggaaaactggctagccatatgtagaaagctgaaactggatcccttccttacaccttatacaaaaatcaattcaagatggattaaagacttaaacgttagacctaaaaccataaaaaccctagaagaaaacctaggcattaccattcaggacataggcatgggcaaggacttcatgtctaaaacaccaaaagcaatggcaacaaaagacaaaattgacaaatgggatctaattaaactaaagagcttctgcacagcaaaagaaactaccatcagagtgaacaggcaacctacaaaatgggagaaaattttcacaacctactcatctgacaaagggctaatatccagaatctacaatgaactcaaaacaaatttacaagaaaaaaacaaacaaccccatcaaaaagtgggcgaaggacatgaacagacacttctcaaaagaagacatttgtgcagccaaaaaacacatgaaaaaatgctcaccatcactggccatcagagaaatgcaaatcaaaaccacaatgagataccatctcacaccagttagaatggcgatcattaaaaagtcaggaaacaacaggtgctggagaggatgtggagaaataggaacacttttacactgttggtgggactgtaaactagttcaaccattgtggaggtcagtgtggcgattcctcagggatctagaactagaaataccatttgacccagccatcccattactgggtatatacccaaaggactataaatcatgctgctataaagacacaggcacacatatgtttattgcggtattattcacaatagcaaagacttggaaccaacccaaatgtccaacaatgatagactggattaagaaaatgtggcacatatacaccatggaatactatgcagccataaaaaatgatgagttcatgtcctttgtagggatatggatgaaattggaaatcatcattctcagtaaactatcgcaataacaaaaaaccaaacaccgcatattctcactcataggtgggaattgaacagtgagatcacatggacacaggaaggggaacatcacactctggggactgttgtggggtggggggaggggggagggatagcactgggagatatacctaatgctagatgacgggttagtgggtgcagcacaccagcatggcacatgtatacgtatgtaactaacctgcacaatgtgcacatgtaccctaaaacttaaagtataattaaaaaaaataaatttaaaaaaaaaatcaaaaaatagcagatgctgacaaggttgcagagaaaagagaatgcttatacactgctggtgggaatgtaaattattttagccattgtggaaagcagtatggaggtttcttaaagaacttagaactatcattcaacccagcaatgccattattgggtatgtacccaaaggaatataaattattctgtcataaagacacatgcatgcatatgttcattgttcactgcagcactattcacaatagcaaagactggataaagaaaatgtggtacatatataccatggaatactatgcagccattaaaaaaaagatcatgtcctttgcagcaacatggatgaagctagaggctccatcctaagcaaactaacacaggaacagaaaaccaaataccacatattcttacttgtaagtgggagctaaatactgagtacatgtgaacacaaggaagggaatgacaaacactgggacctacttgagcgggtagggtgggaggagggtaaagataaaagaaactgcctatcaggtacttacttattacctgggtgatgagataatctgtacaccaaacccccatgacatgcagtttaccttatataacaaacctgcacatgtacccctgaacctaaaataaaaggtagaggaaaaacatgttgtattatatctcaactcactagcagttaatgaagaagaggataacaggagtccagaaaaagatagtgaatagtatcagtgaaaagggccaaaaaatgaagacatataatgggcacaataagccagtgcaggatttcaattttaaattcatagataggaccagatgccttctcccagtgcctcttagaataaagtccatggagaaaataatcttcagtcattaattgtattcagaatgcttttttcccctaaaagggcatgaatccttggcaatattttgtggttatcctgattctttagtacagagtgtaatgtagaatggccaagattgcaaagcaaatttcaaattacatccttttccatctctggttgtccttaagcagcttcctttgcaaatcatccaaagagtcaggcttaaaagatatacataatttggtcctgcacctcatcaaatacatgttattgaagcccctgatggattaagaaaatcctggacacattttttcttcaataaacattttcataagatattcttctggtagaatattgatattgttttctttcagttttaagagaccttgtatctaggtagatgagtattaaataaacttggaaagctcagccttaacagaatgaagagaaaacaaatgttttaaataactcgggaaatgttattgaatggatgcatgaaacactggcataaaaataagttgtgtagcttaggaccttgtaaacagcagagcactttagaaaaaaatatattaaaaaactgagttggcattttcatttttttctttgctttgttatttgatgatatttttaattcatacaaatgtatgtctggtgcgtaaaaaattaagaatgttaaatcttacatatgaacaacactggttttttaagtcagactgatctgggtctgaatattgggcctacatctttaccagctctctatccctgaacaggttacttgtatatttacatgtctatttttcctcaccagtaaaatgagaacaaccacttttaagttgctttgaggctgaaattaaaggaaacaatgcatgtaaatgcactcagcacagtgattatcatagaccaaacactgagtaaatgctgattctagtagttttaagtcttttaattcagggggctctcaaaatttagttttaaatcttacaaacttctttaaaaatgttttccttttctgtagtgtattcacatttttattcattgatttctctgacagctgttctgatgctgtgaagttcataaagactgaaggaaagagtcttaagatagctgtaagaatcctaaatgatgataacaacactatcagatagtaggtgggggagatgacaccaaaaggattcagaagataatttttacatgtgcatcaaggggcatctactgtccccaaaatgctcttttttaaattactttttaatactaaaaaccggaataatagtatcattcattatattatctactcctcggctgctagatgttttgtgtatatcactcttttaatctttttaaccatcagtcctcaacctttttggcaccagggatcggttttgtggaagacagtttttccacagaaccagggaggagtggggagagtgggaggtggtggtagttttggatgaaactgttccacctcgggtcatcaggcattagattctcataaggggcatgcaacctagattccttgcacgtgcagttcacaatagggtccttgttcctatgagaatctaatactgccgcttatgtgacaggaggcagagctcaggcagtaatgctcgcctgccactcacctcctgttgtgcagcccagttcctaacaggccaccaacaaccatacccatctctggccctggggttgggaactcctggttattaaacaacctgattaggttattaaacagcctaattggatggtttaccctatattgttgatgaggaaactgggatttggggatattatgcaactcgaacaagaccccacagctagtaagtggggaaagcagaattcaaattcatatctgtctgactccaacaaaatgcttcttaaatgagtttcatgaaagtggtaacattggttgtcttgtctgtaaccacarccttagtgtctagagtggtgtctgatacaaagtgaggtactcagtaaatatctgttcagtgaagaaatggatgagtcatctcttaacagagtgaaatagatttgaatgtgtgtgtcctggtattttttaaagttgcatagcagtcattttgtgtgtgwttcaagacttagtatttttttttaatttttttccctagcttacctgtggcccatacctgcttcaatcaactttgccttcccccctacaagagcaaaaaggatctgaaacagaaattgatcattggaatttcaaattcagaaggttttggacttgagtaacctagaagacttgaaatataatcttttatatgtagcattcacttccctcttactgtgcctttagccttttcatgtttctgtctcaaaacackttgacaaagctcaccaactttaaaatattaagtttttaaaaaatcaaatatgaagtatgttcagcaaaggcataattttctaaaaacacacacagaaatcgcttgagtgaggaaaagtccacatggcagagacaggtatggtccagttcctcttttatatagcactttatcattctccacaagtagtttgtcacaggcattccactgggaaagcaaagtacagtgaagaatgaatttatggtatagttgaacccagtggcagattgtacactgctagcactgctagcacacagtagcaaagcaaacagctacattatctttaacataaggcatgtagccatattttcatatagtggtatacaacacagtatcattgcaaatgcagtttacagggatttttgatatactggcttgggacctataagattcttctcagcagttgctgaaaagcatgtaaataactacataatagcctgagaataatgggattttgatagtgccatttattgttaaagatttatttttacaaagtaaattcagggttttagatgtgtacacagcttttacaaatcaataaagatgattgtacaagagtattttcagactaattggattcaaggttatattcttttaagtgttgttagtctgcatgcacattggcagtaaactagttacttgtgtactctgtaatatttgtataatgatcatttcttcttaaggctcaagatattagaaaagaaatcagacctaaataatcattgatgaagtatgtcagttacaagcacaaaagaatataactgcttttataaatcttttgaatcatgtacaagacttatatctacattttttgatcaccagttgtaccaaaacactaatttttgaaaaagataggttaaagtatttgacaaaagtgaatacaataataacacttgtgtcaaaatgatatagcttagtataaaaataaaattcaacgttttggccaaaatgtttgtttttcactggattctgaatataataaattcaaagtaccctttttttagagtttctaataaagtagtatgtaaaaagaaactgcattttaagtcagacagtaaatgttttttttaatttacagcaaatgaagcagttttattagcatgttacaaatattgccaaaccaagacttctctaccatactttaacagctttccttcagaaaactctgaagttatatttgcaataataatgaaaccagcatttagtaccagcatatggttcatatgcaaataatactttccccaaaatctttctgggctaggctattttcttgctatgcttcctgcacccaaccagcagaattcttccagggtggaggaactaatcagcttgttctccaacagttctgaagccaacccacaaatctttgaggaaaaggggtcactttgtttactattctcttggagatggaagtgattctgctcttccatttgggtatattatttcaagggtatttcttcttaaaaatcttggaaagcctaagagagttaaaggcatcctggttttgtttcattttgctctgttttaaatccatatgcaaataaaactgcttctctcttacactgcttgaactagaaaatcagctttttaatgtaggttaccacttataagcacaaaagaaacatgtataagaaaccagatttaagtgttttaaataaaatgtaaacagtttttatttggtagagatgactcatggaaaaattgtgttggcttggtctgcatgtttaatgatgtgcttgtatatcgattagctgtgtcacttttaaataagaagtccacacaagcaagccaaatttttagatgacgaagtccataaataactagagaatttttgttatctgttgttaagttgaaatgtataatcatttatcactaaattgcacattgcctttatttatttgtgctctgtttttggtttacagtgtaataatacctcatttaaaaaataaaaaccactactgttacattttattaatttaaaaagctagaaaattcatgtagttactttttttacatatataatctgttaatgaattattgatttttgtatctgccacagtaaattaaagcattacacagtatttatcagtattttttaaacatcctgtccttttttaaaatctttgcttagtcagtcatatttttgtctgtatgattagaagtttttacgtccttccttttttgtacaaatctgtattgtattaatttctggatgcaatttttcaaatattaaaattatacagtcagtcaggcttcagtttattttttgaacacttgggcaattaattaaagccatatgtttaaaatattttataaatgcaagctattctttgcattatactctctcaatctagtgcttaggaaaattgctgacacataacttcaaaagatgtatgttgttgacattaagtattaccaacctctgtagcatattttcagcatgaaatgtatatccaatatttgaaagatcacacagctattccaccaaatgaatgtataataccatttggagtacacccagaagtgaaccaagtgtaacatttcattggccgtagatagataacttcagctcttaagtaagtattcctctccaaaaccattcatttggcccttttccccttgtccacatacctcatgcttaaggaaggaagagtggagattataagaatgtaagagagaatgttatgggtgattaatgaaagaaaataggtagctggatggaaaaaagaccaggatgggttttcgcaggaggggacacaagatcagttcacccagatggccgcaaatcgtttagtctagtgcctaggttttggagccagactgcctgggttcaccatttactagctgggcaagttaacttcctcattcctcaaatgtacaatggaaataatttgtaaaatggaaataacctacctaccccatagagttgtagggaagattaaatgaactaatgtgtaaagcacttatccagtgcctggcacatgataagcaataaaaagtgatgcaagacaaattatggtactgatgtagaaacatcctacaaccactgcttctgacgccttctggaggcttttgacttaaatgctgggttcaaccacagattatagaacgcaaagtgcttttgaagccttaaaattgtgttgggagaatctttcttattctagaaacagtactgtaggatttatccttatagctgtctcatgatgcaagggttttaaatactattttatagctgtgtaacaagatacaattctatttttaatgaaatagttcaagtaaacagaaaaatttcaggattaacataatgaaataccatgatcccacactcagacctaaaaaatgataatatgtgttaatattaccagttttttaaaaataattttgcaaatgggattgaagccccttttgtgcccatctccaatccccctctactccctctctgttctctgttaacctgtagttcgtgtgaatctttcccatgctgtctttacatatatgtacctatgtgtaaacactatgtaatattgttacagttgcatacatctcatgctctatatatctttccaaaacttttttcacttaatattgtcttttatagatttatttacatttagatataatgcatttttaactgcagaatagaatcatgaaatgcatgtaccactttctggatccatcctcccacacactaacattgagttgttttccagtgtgaaccaggctctctagactatagcccagatgtagaattgctggatcacaggctgtacatctccggctttaccagatattgtccacttgctctccagagtggtggttccggcattaatttccatcagcattataaagagttgtcgtttgtccacattctccccaacacttggctttagcagacctttcttggcttatttaactagtgtgatttaatttctatttccataattgttaatggcattgaacacctttgtgtatatttacaggctcttcagatttcttctgtgaatggccagttcaatattcttagcctgtgttttcctattttttttccctattggtgtttaggagttttttccttattctggatattgatcctttgttaacaggagctacattgcttcagttgaattccagatctgccaatgactaagtgacttggaacaaattacttcaaattacttaatgtttctttgtctcagtttactcatctagaaactaaagaaaataatacttagctcacagggttgttaaataagtttccatacaggtatatttgtatgtatgtacatatgtatgtatatgtgtatattatatataagtttataagtgtatcagatatatgcatatgtatagacttacatacttaaacttacagaacatacatatgaagggcttacatttgtgcctgacccataagtggtctctaaatgtttggtattattactattgttattacctgtattctaattcttattgtgcttgcattacaaatattttctaatatgtggcctaatttttaactttatttacctcatcttttatactatgaatttttaatgttaatataatccataaaataaggtgccattattatcattttatgtagataatgtttagatttaaccacacatttacaacttcttcaaacaccattccctcttctatggtcctccacctacctctggaatcaaatttcctcctcataaagaacatctattagaaattattttaatgagggttggttggtagcaaattattttaaataactgtcacctttattcatgaaagatttattaagcatacatttgtaggttgataattattttatagtttttaatatattaatccattacctttgatttcgttgttgacataaagttagctattagtataattgtatgccttggtaatctctcttttttctctggctacttttaagatttttttttttttcaaaaaatggtagaacatcaaagccaacatgtgtatgtgtattttttctcccacttgagattcattatggttcttgaatctatagatttgtatctttcatcaattatggaaaaattcttaagctgtttcctctttggctattgctttttcctgttctaatttttcctgttgaacatatgttggaccatctcattcaaccattccatctctttctctgtacctaatgtgttgtttaaccaacccactgagattaaaaactcagttttaatcagtggctgcattttttgatttctagaaacttctttggcttcttttcaaattcacatgctctttttccataccatttcttcatatggttttctttaataattttggcatacttgtttaatgttctcttttaaattgttctctttagtccttaaagcactcatttttctatttgttcatccgttgtctcacagtggtttatttccttatgtgatctgtaatttttgattttgcatttctacttaaaggatgatcttttccactggacatcctgtgtgtcctgaatactgtaagtagcctagcaaagcagttttatgttgttctcaaccaagaacttacaggtttcccacagatttttatgttaacttcttcgattagagttccttctccacttgtgtaaatttggaccccatacttacagtggcacagttgggatttatgagtagggttcttctatcttcttttcatagacagagcaacccttttaaggtctaggatttatgcaagagaattcgttttggctcctcaccttaaagaggcctacagcatgtctgttgagctcatgtggacattaacatccattagagagctcatcctcatgagtcaccctaatatcagcacctgcttcctacttccggcttttcatttcttccttatttcctatatctaattatttcccttcctttcaagcttggatatatattttttatagatatatgttgtccaaaatttataaaagtttatagtactagatggcctcttccatttcagcttggtctatagaagcatacccattgcactaatgtttgtgaatttgttcaacacttgtttattgagtgcccattatatttcagcaggaggctaatcctcagcttcatactcacttattctttataaacataagcagcaaattaattctgagtatcttatgaaaccttaaatgtgtatcatagcaagaaaatttcttaagggttttcgtgacaattatgcagctcaatgttttcatgccctttagagattatgactgaacacatgggcatacatacaatagaagcattagtcgccactgagttaagctggtaggtttttgtgggttttttgtttttttgtttttttttttgagatggagtctcactgtgttgcccaggctggaatgtagtggtgtgatcttggctcactgcaagctccgcctctcgggttcacgccattctcttgcctcagcctcccgagtaactgggactacaggcgcctgccaccatgcccggctaatttttttgtatttttattagagacagggtttcaccgtgttagccaggatggtctcaatctcctgaccttgtg

SEQ ID NO: 94010 - DNA, 13171 bp, Homo sapiens
gcacagagatggaggaaaaacactagagcctcagggacctatgggaaaacattaaacaatctaatagaagtatatctggagtccctgaaacagaaaagaggtcagaaatacacttgaataaataatggttagtatttttccaaactgatgaaaactatgaacacacaggtagaataaactcactaaagcccagtcaaataagtacaaagaaaaccctgcaagcagccagggattagagggtgagaaaacatgaacaggggagactaagataataataattacacattgcctaagagaaacaatgaaagccagaagacaatgaaaacaatctataaagtgcagcaaagaaaaaaaaaagtcaacctgtagttctatgtccagggatatatttgtcaaacataaggcaaacattttttttgagtaaagaaatccaattatcaccatagatatgaacaacaacgttagtaggaaaaaaaaaacccacaactttatgctgaaattaagcaaaaccagctcagaatttggatctataaaaataaataaagagcctccaaaatggtaaatgcgcaaataagtattaaggttattttttccatttttgaaatttttagaaataactgatcatttaaagcaaaaagtaatactatattatgaggtttatatgtataaataagatatacgacaatgggaaatggaatcacacccttataaaggtcttgcattatatacatagagatataacatttaaaggtgtacttcactcagttaaagtttcatgttgtaaacactagacagcactaaaattatatataattataaagaggtacaactagtaagatgataattctgataaattggaataattttataatctcaatatagaaaaaggcaaaaaaaataaagacaaagtagtaaaaaacagatgggacaaatagtaacaggctgatttaaatcaaatcataataatagttacactaaatataaatgatgtaaaaacattaattgaacagaagagattattagatgataaaaaagcaatactccaatatatcctatctgtaagaaataagctttaaatataaagacagaaccaggttaaaataaaatgacagaaaggaggataaaatgcaaaaactaatcataagaaagctgaagtgactatctcagtatcagacgaagtaggctttaggacaagaaatactacaatatatagaaagacatacagaatatattttattataacaaaaaagtcaatttaacaagaagatatactcatcctaagtttgtatgtacttaataatatgtgtgttaaaatcatgaggcatacaatttctagagtgaaaaaagaaatagatactttcatgagtagagttggtaatattagcactcctctcttagcaactaatataacaagtggagagaaaatcagcaagtacatagaagacctaaacaacaccatcgaccaactcaaataagttgacctttatagaatctccaccatacaatggcagaattcataccttctcaagtgaacctggagccttctccaatgtaaaccaaataatagggcattacataagtttcaataagtttaagaggactgaaattatacagaatacattatctgacatgatggcattaaattagaaataaataataagaagatatttttgaaattcctaagtatttggaaattaagcaaaatatgtttcgttttgtatttttgagacagggtcttgctctgtccccaggcaagtggcacaatcttggcttactgaaacctcaccctcctgggttcaagggatcctcctgcctcagcttcctgagtagctgggactacatgtacatgccatcacacctggctaatttttgtatgttttgtagagacaagattttgccatgttgcccaggctggtctcaaactcctgggctcaagcaatctgcccacctttgtctcccaaagtgctgggattataggaatgaaccactgtgcccagcataaaatatgtttaaataacccaatgaattgaagatgacagcaatattttaaactgaatgaaatgaaaactaaaaatgcaacatgtaaaactttgcaggcttcagctaaagcagttcttacaacaaaatgtatagcattacatgctttttttgaaaaatgggaaaagtctaaattcggtagtctaaacctctaccttaagatactgataaaatgaatatcaaagcaaactcaaaataagaggagaaaataataaagatcagatctgacattaataaaataaaaatggaaaaacaataaaatcaaaaggtcattctttgaaaggatcaacaaaatttatatactttcagttgactgaacaagaaaaagagaagaacagatataaattgccagtatcaagagtcaattaatacataccactacagaccctagagtcataaaaaggttataaggaaggattataaagaaatagacttacacaaatatattcaactacttagataaagtggagaaattttttaaagataccacacataagaaaaaaatagaaaatctgaatagctctgtatctatctaaaaaaaaatttttttaaaccttcctacaaagaaaactccaggctcatatgacttcagtagtaaattctatccatcatttaaggaataaataataatacacattctctttttagaaaatagagaagtttcctaatttattttatgaggccaaactaccttgataccaaattaccaaaaccagacaaaaatatctcaagaaacatacagaacaatatctatcattgaatatacaaattcttttataaaatattagcaaattaaacctagcaataaaaataaaatatattgtgaccaagtggagctcatcccaaaaattcgggattcattaacattaaaaaattcattaacatgattcaccatgttaacaaaataaagaaggaaaactacacgattacctgaatttatggaagaaataaaagaaaagcattcatcaaaaatcaagctctcaacaaaatcaggggagaaacggacatcctcaatccataaagaacatatacactcagtccacaattaacaacatttaatgatgaaaaacaatacttccctccctataatcaggagcaaggcaacgtctgctcccaccacttctactaagcattgtcctggggcttctacccagtgcaataaggcaagaaaaagaagcaaaagtcatacacattgcaaagaaagaaataaaattgcctttatttgtaaataacataatatctggatgtaggaaattctaaaaaatctacgaaagctgctagaattaattgactaatttagcaaggtcagataataaaaggtcaatatataataattatatttctctatgctagcaatgagcaattggaaaatgaattttttaaaatatccattatcaatagcatcgaaaccttaactatgtaggaataaatatgtgccatattatatgctaaactacagaatatttctgggagaaattaaataaatctaaataaatgggaagaaatataatattcattgatgggaagactcaatattgtgatatcaattttcccccagttaatcaatagagtcattgaaatcaaaatcccaacagacattttagtagaaaatgaccagatttttctaaaacttctatgaaaatgcagataatctggaagagccaacacagctagggaaaagctgaagaacttgcaccagctgacttccacgtctgccccagtaacaaagtcaatgtggtatccactttgaaagacacatgcagatccatggaataaagttaatagcctacaaatccatgtgctcttaaaggttcagttgattttccagtcaagttaatggggaaaagataatctttttaacaaatagtactaggacaactggatatcagctaaagtacaaaaacaacaaaagcaaaacaaacaaaacagcacctgtcaaacacatgcaaaaaaacttgaaatgggtcatagtcctaaatctaaaattataaactacaaaactcctggaagaaataaggagaaaatcttatttttgtgacatagaggctagcacaaatttcctgcatatcatgcaaaaagctaaaccccatattttttgaaaaaactgatcatttaaacttaaattagaaagcttctgttcttagactttttttttaaatgaaaaggtaagccatatattgggggaaatattcataatacatgtttcagaccaaggttctgtacccaaaatatataaagaactcttacaacttaataataagaatatattgaaaaaccaggttttttcaaaatgttggcaagtatttcaaaatgtcatttataaacaaaagatatataaatgatcagtaagcacatgagaaaaatgtttgccatgttatcagagaaaagcaaattaaaatctcaagaagatataagcacaaaaccactagattagcaaaagttaaaaagctgaaaaatagcaagtagcaagtgttggtatgaatgttacacctcactggtggaaatgtcaagtgagacaggcctttggcaagcagtttggaagtttcttacaaagtcgaacattcacttagcatatggcatggtgcttgtgtgcctaggtatttgcgtaagataaatgaaaacataatccaacaaacgcttgcacatgaatgttcatagcaattttactcaacagccccactaaatcaccacattgaaaattatgccttaataatgatgcttgaaaaaaaattgtgtttttgaatatcattagagagaggttggaaagtaactgagaaaacatgatcaattaaaaacaatggcatttatgaggaaaaaataaaatggcaaatataatatctagaaataaattatttggcagaaaagaaaagtgaaacagatcagtacttgtaataaatatgagttctgttcatgtagcaaaagagagaaccttacaaattgggttaaaaaaatccaattctgcaccaacagaagagacgcaccaaggcacaactttcatatggaagttgaaaagaattggatgggaaatggatgccaatcaaatgctaataaaaagctagcaactggaggcattgacagaaaataaattagaagtcggggtgaaaataacaagggggattaaattggttatttatataataaagggaataatgcattaagaagacatgtcagtcataaacttttttgcacataacagcttaaaacacacaatgtacaaaaagtagaaaattctcagtcattgtaagagacagtaacttaaaattcagaaactaacagattaaatagaaagaaagtagaaaagttgaatacctatatgtaataagctaggtctaatttgcctttcaatattgaacttgcacaattagaggatttgttttaagtgttcaacaggggcagtgactggcttccaagcccactcacctggctgttgaccagcctcactctccccacatgagcttgtgcacaaggcggcctcacgatctccaggtcgctggtctcagggaaaccttggcagctggttttccccagatcagtgattggaggataatgagaaagaaaggagactcaaaatggaaagtcagaatcttttaatacttaatgttggaagtgacattccatcatttctgacatgttctgttcattagcaattagtgaagtctgctctcacagctgacatgtatatatgtatatatatgccttacatgtctacaggtgcacatacctgcggatgcaggacttacacatctataggtgcacacgtatgtttacataggatttacatgtttatagatacacatgcgtgtatatacaggcatacttcagagatgagggctgggttccagaccactgtaataaatcgagtcacacaaattttttgttttcccaatgcatataaaaagctgtatttggaggtgctggaaccatccgggtgcctcttgctctgctgctttagctccggagtgtttggcgatggggcagcaggaggtggggaggctcatgtcgaggtttaatgcattcaaaaggattaatrccatactgcaccatttgagaatgtccaagcacacagatgcagcagaagacgtgctattggggggggrraaaraaacgtgtgcagatgtatccatggctagagaagtgggaagaagatcctgaaactctcctgatcattataaagggagccggaggaaaggctttctgtgatgggagtgatattagagtcatctcsgaggctgaaaaggcaaaacggaagatagcgccagttttcttcagagaagaatatatgctgaacaatgcttttggttcttgccagaaaccttatgttgcacttattcatggaattacaatgggtgggagagttggtcgtcagtccatgggcagcttcaagtggctacagaaaagtgtctttttgccatgccagaaaccgcagtagggctgttccctgatgtgggtggaggttatttcttgccatgacttcaaggaaaacttggttacatccttgcattaacaggattcagactaaaatgaaatgatatgtacagagcaggaattgctacacactttgtagattctgaaaagttgggcatgttagaggaagatttgttagccttgaaatctccttcaaaagaaaatattgcagctgtcttagaaaattaccatatggagtctaagattgatgaagacaagtcttttatacttgaggaacacatgggcaaaataaacagttgcttttcagccaatactgtgggacaaattattgaaaacttacagcaagattgttcatcttttgccctagagcaattgaaggtaattaataacatgtctccaacatctctaaagatcacactaaggtaactcctggaggggtcttgaaagaccttgcaagaagtactaactatggagtatcagctaagtcaagcttgtatggagggtcatgacttttatgaaggtgtcagagctgttttaattaataaagaccagagtccaaaatggaaaccagctgatctaaaagaagttactgatgaagatttgaataatcactttaagtctttgggaagcaatgatttgaaattttgaggtgacaggctttcagggtatattctgtagcatgggttggcaatctgcagcacgcaggccaaatccagcctgctgcctacttttatatgcactacaagctaagaatggtttctgcatttttaaatggttgggaaaagaaatcaaagactaatatttaatgaagtaaaaattatatgaagtatcagagttcacaaataaagctttattggaactagttataaaaaagttatattaatcctggccaggtgcggtggctcatgcctgtaatcccagcactttgggaggccgaggcgggtggatcacgaggtcaggagatcgagaccctactggctaacacagtgaaacctcgtctcaactaaaaatacaaaaaaaattagccaggtgtggtggcaggtgtctgtaatcccagctactgaggaggctgaggcaggagaatggcatgaacctaggaagtggagcttcatgtaagccgagattgtgccactgccctccagcctgggcaaaagagcaagactccgtctcaaaaaaaaaaaagttatatttatcctttactgtagtctattaagtgtgcaatagcattatgtctaaaaagcggtgagcataacttaatttaaaatattttattggtaaaaaaagctaaggatgatctgagccctcaaggagtcctcatctttttgctggtggattgtcttgcctcaatgtcagtggcagctgattgatcagagtggtggttgctgaaagttgaggtcactgwagcaatttcttaaaataatacaagaattgagtttacccctttgattatatcttcctttcatgaaagatttctatgtagtatgtaatgccatttgatagcattttacccacagtagaacttccttcaaaattggagtgtttcctctctgctgctttatcaactaagtttaggtaatttctaaatcctttgttatttcaacaatgaacacacagcatcttcaccaggaagatattgcatctcaagaaaccactttcgttgctcatccataagaaggaattcctcatgtgttctctcatgagattgcatcaatccagttccatcttcagactccacttctaattctagttatcttgctgtttccaccacatctgcagttacttcctccactgaagtcttgatgccttcaaagtcatccatgaaagtggtaataaacttcttgctaagctcctgttaatgctgatattttgacctcctcctacaaatcatgaatgttcttagtggcatctaatatggtgaattgtttccagaagattttcaatttattttgcccagattcttcaagtggaatcactgtctgtggcagctagggccctacagaatgtattctcaaatattaagacttgaaagtcaaaatgactccttgatccttgggctgcagaataggtctgctaatagacatgaaaacattcatctcattgtacatctgcatcagagctcttgcataaaaaccaggtgagttgtcaatgagcagtagtattttggaagagatatttttttctgagaagtaggtctcaacaatgggcttaaaatattcaggaaaccatgctgtaaacagatgtgctatcatccaggctttgttgtttcatctataaaacgtaggcagagtagatttagcatcattcttaatggctctacgactttcagaatgttaaatgagcattggtttcaactgaaagtcaccagctgcaccagctcctaacaagagagtcagcctgccctttgaagcttggaagccaggcactgacttctcctctcaaggtatgaaagccctagatggcatcttcttccaatagaaggctgtttcatctacactgaaaatctgttgtttagtgtagtgaccttcatgaacaatcttaggtagatcttccagataacttgctgcagcttctccatcagcactttctgcttcaccttgatactttcatgttatgaagatgtcttttttccttaaacctcatgaaaccacctctgctagctcctaactatttttttttttttttgcagtttcctcccctctctcaagcttcatagaattgaagagagttaaggcctttctctgcattgggttttggcttaagggaatgttgtgtatggtttgatcttctatctagagcatttaaacttcctccctatcaacaatatgcctgtttcactcaaaattcttgttttcactaaggtagcacttttaattgccctcaaaactgttttctttacattcacaatttggttgactctttggtacaagagacctagcttttggcctaactcagcttttgatattccttccttgctcagcttaatcattcttagattttgctttaaagtgagagacgtgcaacttttcctttcacttgaacacttaaaggccattgtagggctattaactggcctaatttcgatattgctgtgattcagagaatagggaggcctgagaagaggaagagagttggggaacaactaggtaatggagcagccagaacacaaacaatggttattgcttaagttctctgtcctatatgggtgtgattcctggtgccccaaaacaattacaagagtaacgtcaaagatcactgatcacagatcaccaaaactgatataataacataaaagtttaaaatattgtgagaatttccaaaatgtgacagagacaggaagtgaggatgtgcatgtgcacctgtaaacattcaaggcctaaatgcatgtgcacctgtagacatacaaggcctgtgtgcatatgtgtgtgcacctgtagacatacaaggcctgtgtgcatgtgcacctgtagacatacaaggcctgtgtgcacatatgtgtgcacctgtagacatacaaggcttgtgtgcatatgtgtgtgcacgtgtagacatacaaggcctgtgtgcatgtgcacctgtagacatacaaggcctgtgtgcacatatgtgtgcacctgtagacataaaaggcctatgtgcatatgtttgtgcacctgtagacatacaaggcctgtgtgcatacgtttgtgcacctgtagacatacaaggcctgtgcgcacttatgtgtgcacctgtagacatacaaggcctatgtgcatatgtgtgtgcacctgtagacatacaaggcctgtgtgcacatatgtgtgcacctgtagacatacaaggcctgtgtgcatgcatgtgcacctgtagacattcaaagcctgtgtggatatgtgcgtgcacctgcagacatacatggcctgtatgcacatgcatgggcacctatacctataggtgcacctggtattcactttatcacacttcacagagaatgtgtttttttgttgttgtttttaataaattgaggatttgtggcaaccctgcatcaaacaagtctattgaagcaatgtatatctacatacattatatgtctacaggtgcatgcacatatgcacacagaccttgtatgtctacaggtgcccatgcattcatacaggcctcgcatgtctacaggtgctcatgcatgcacacaagccatgcatacctacaggtgtgcatgcatgtgtacctaggtctaatttatttataggtgcagaaacatgtatacatgtctgtaagtgtataaacatgcatataaatccttagagagagctctggggatttccctggggggggaaatgagattgggttagtagtcgatagtgagttgaatggtggcccccaaaaaagtacgtccatgtcctaaaccccagaactggtgaatgtgatcttatttcaaaaaagggtctttgcagatgtaattaagttaaagagcttgagaagaagtcatcctgcattatctgtgtgagtcctaaatccaatggcagtcatccttacaagagacaaaagagaagacaggagcagagggaaagccatgtgaagacagaggcagagactggagtgmtgtggccacaagccaaggacccccaggattgcctgccagcctggtacacagaagagaaggggagaagacggattctcccctgagcctccagagggagccagcctggccagcaccctgacttaggacttcaggcctccagaactgtgagagaaaatatgtcagtcaccttaagccaccaaatttgtgatcatatgttacagcagtcacggcaatcttatttttatcaataatgttgaaattatttataggaacagtagaatcttgtataatttatgtagataaaatatcaggctccagatttgtttggatgtggttcacccatgaaagacacaaagccagaacaacggtggctgaaggactctccctgggggtgtggcttggtcctgggaaacaggcgcgggcatctcaggaccctgacaccatcctgggaacctgtccgtgccccttgctgcttctgccctgtggacacagggtcttgccccctatctgcgttgtgtggccacattgcattccagccaggatcaaggatgcagggaagaattgtgagccatccaccaacaaggacactgccagggagctgacttgatctctttgctcataccctatcggccagcacttggccatatggccacaccttgctgttaggaatctgggaactgtagtcaaggcaaccatgtactcaggtgaaagccaggcgttccattagcatacagcagtatttctgggatgagggtgatgaggatgatgttggtattcagggcagggtagtctgttgtgcagtagggtactaagttatccagttccccagtcatatgacaattcaaaatcatctcctgttgaggaccattgccctgtatgaagcagaggactgctgccgaggtacaattaattggaagtgcttgctggatcggcctaaagcaatacatcactgatgccatccacaccacctctattcaggaggattgtcctctgtgaccacggactaggtcaaggaagcagttgtcgttttgctttacatgtctttattaatgcatacatgtgcacacatggttatgtgggtcaccgtagctttgccacacatgtagatattctaacaaattctagcggctgtccttccacttaattgcagacaccactacttcattcattttagccatattataacatatttaaccaaggatctattttctaccttctctttttctttcttttttttctctttgagactaaatctcactctgtcacccaagctgcagagcaatggaacgattttggctcactgtaacctccgcctcccaggttcaagggattctccagcctcagcctcctgagtagctgggactacaggcgtgcaccaccacacccggctaatttttgtatttttagtagagatggggtttcaccatgtttcccaggctggtcttgaactcctaacctcaggtgattcacctgcctcggcctcccaaagtgctgggattacaagcctgagccactgcacctggcctaacttctctttttctaagcttataaactgacacatacttatggtgaaaattgaaataataaaatcacatggagaaaataagaatgcatacttatcctatcttctctttttctaaaattataaactgatacatacttatagtggaaattaaaataataaaatcttatggaaaaaataagcatattttagttcccattattctgttgctcagaaattaaacacttaaccatatagtgtaaatcttaacaaatattttaatgttcatgtaatctggatgaacaactgtttgtaagagctactaactgttccattcatcaatgtgttgttacttattggaaatctttctgctagtgggtgtgtaagtagcttctgattttaagctattgaaaatatgcaagaataaataccctcaagcacatatttcagtgtatttccatagtttaaatttctggaaacgtaaattgttatatcggagattatgaaatttgaaatttttgaattgtgatacatgttttaaaatggcctgcagaaatacttaaccaatttacctgggcagcagaaacacataatttccttttcctccccatgttcatgaacacgtgcacattcattcttcagatagt

SEQ ID NO: 94011 - DNA, 12783 bp, Homo sapiens
tgcgcgagccgaagcagggcgaggcattgcctcacttgggaagcgcaaggggtcagggagttccctttctgagtcaaagaaaggggtgacggacggcacctggaaaatcgggtcactcctacccaaatactgcgcctttccgacgggcttaaaaaacggcgcaccacgagaatatatcccgcacctggctcggagggtcctacgcccacggagtctcgctgattgctagcacagcagtctgagatcaaactgcaaggcggcagcgaggctgggggaggggcgcccgccattgcccaggcttgattaggtaaacaaagcagccaggaagctcgaactgggtggagcccaccacagctcaaggaggcctgcctgcctcagtaggctccacctctgggggcagggcacagacaaacaaaaagacagcagtaacctctgcagacttaaatgtccctgtctgacagctttgaagagagcagtggttctcccagcacgcagctggagatctgagaacgggcagactgcctcctcaagtgggtccctgacccctgacccccgagcagcctaactcggaggcaccccctagcaggggcacactgacatctcacacggcagggtattccaacagacctgcagctgagggtcctctctgttagaaggaaaactaacaaacagaaaggacatccacaccaaaaacccatctgtacatcaccatcatcaaagaccaaaagtagataaaaccacaaagatggggaaaaaacagaacagaaaaactggaaactctaaaaagcagagcgcctctcctcctccaaaggaacgcaattcctcaccagcaacggaacaaagctggatggagaatgactttgacgagctgagagaagaaggtgtcagacgatcaaattaccctgagctaggggaagacattcaaaccaaaggcaaagaagttgaaaactttgaaaaaaatttagaagaatgtataactagaataactaatacagagaagtgcttaaaggagctgatggagctgaaaaccaaggctcaagaactacgtgaagaatgcagaagcctcaggagccgatgcgatcaactggaagaaagggtatcagcaatggaagatgaaatgaatgaaatgaagcgagaagggaagtttagagaaaaaagaataaaaagaaatgagcaaagcctccaagaaatatgggactatgtgaaaagaccaaatctacgtctgattggtgtacctgaaagtgatggggagaatggaaccaagttggaaaacactctgcaggatattatccaggagaacttccccaatctagcaaggcaggccaacgttcagattcaggaaatacagagaacgccacaaagatactcctcaagaagagcaactccaagacacataattgtcagattcaccaaagttgaaatgaaggaaaaaatgttaagggcagccagagagaaaggtcgggttaccctcaaagggaagcccatcagactaacagcggatctctcagcagaaaccctacaagccagaagagagtgggggccaatattcaacattcttaaaagaattttcaacgcagaatttcatatccagccaaactaggcttcataagtgaaggagaaataaaatactttacagacacgcaaatgctgagagattttgtcaccaccaggcctgccttacaagagctcctgaaggaagcactaaacatggaaaggaacaaccagtcccagccgctgcaaaatcatgccaaaatgtaaagaccatcgagactaggaagaaactgcatcaactaacgagcaaaataaccagctaacatcataatgacaggatcaaattcacacataataatattaactttaaatgtcaatgtactaaatgctccaattaaaagacacagactggcaaattggataaagagtcaagacccatcagtgtgctgtattcaggaaacccatctcatgtgcagagtcacacatcggctcaaaataaaaggatggaggaagatctaccaagccaatggaaaacaaaaaaaggcagggattgcaatcctagtctctgataaaacagactttaaaccaacaaaattcaaaagagacaaagaaggccattacataatggtaaagggatcaattcaacaagaagagctaactatcctaaatatatatgcacccagtataggagcaccaagattcataaagcaagtcctgagtgacctacaaagagacttagactcccacacattaataatgggagactttaacaccccactgtcaacattagacagatcaatgagacagaaagtcaagaaggatacccaggaattgaactcagctctgcaccaagcagacctaatagacatctacagaactctccaccccaaatcaacagaatatacatttttttcagcaccacaccacacctattccaaaattgaccacatagttggaagtaaagctctcctcagcaaatgtaaaagaacagaaattataacaaactatctctcagaccacagtgcaatcaaactagaactcaggattaagaatctcactcaaaaccgctcaactacatggaaactgaacaacctgctcctgaatgactactgggtacataatgaaatgaaggcagaaataaagatgttctttgaaaccaacgagaacaaagacacaacataccagaatctctgggatgcattcaaagcagtgtgtagagggaaatttatagcactaaatgcccacaagagaaagcaggaaagatccaaaattgacaccctaacatcacagttaaaagaactagaaaagcaagagcaaacacattcaaaagctagcagaaggcaagaaataactaaaatcagagcagaactgaaggaaatagagacacaaaaaacccttcaaaaaattaatgaatccaggagctggttttttgaaaggatgaacaaaagtgatagaccactagcaagactaataaagaaaaaaagagagatgaatcaaatagacgcaataaaaaatgataaaggggatatcaccaccgatcccacagaaatacaaactaccatcagagaatactacaaacacctctacgcaaataaactagaaaatctagaagaaatggataaattcctcgacacatacactctcccaagactaaaccaggaagaagttgaatctctgaatagaccaataacaggagctgaaattgtggcaataatcaatagcttaccaaccaaaaagagtccgggaccagatggattcacagccgaattctaccagaggtacaaggaggaactggtaccattccttctgaaactattccaatcaatagaaaaagaggaaatcctccctaactcattttatgaggccagcatcattctgataccaaagcctggcagagacacaatcaaaaaagagaattttagaccaatatccttgatgaacactgatgcaaaaatcctcaataaaatactggcaaaacgaatccagcagcacatcaaaaagcttatccaccatgatcaagtgggcttcatccctgggatgcaaggctggttcaatatacgcaaatcaataaatataatccagcatataaacagagccaaagacaaaaaccacatgattatctcaatagatgcagaaaaagcctttgacaaaattcaacaacccttcatgctaaaaactctcaataaattaggtattgatgggacgtattccaaaataataagagctatctatgacaaacccacagccaatatcatactgaatgggcaaaaactggaagcattccctttgaaaactggcacaagacagggatgctctctctcaccactcctattcaacatagtgttggaagttctggccagggcaattaggcaggagaaggaaataaagggtattcaattaggaaaagaggaagtcaaattgtccctgtttgcagacgacatgattgtatatctagaaaaccccattgtctcagcccaaaatctccttaagctgataagcaacttcagtaaagtctcaggatacaaaatcaatgtacaaaaatcacaagcattcttatacaccaacaacagacaaacagagagccaaatcatgagtgaactcccattcacaattgcttcaaagagaataaaatacctaggaatccaacttacaagggatgtgaaggacctcttcaaggagaactacaaaccactgctcaaggaaataaaagaggatacaaacaaacggaagaacattccatgctcatgggtaggaagaatcaatatcgtgaaaatggccatattgcccaaggtaatttacagattcaatgccatccccatcaagctaccaatgactttcttcacagaattggaaaaaactactttaaagttcatatggaaccaaaaaagagcccgcatcgccaagtcaatcctaagccaaaagaacaaagctggaggcatcacactacctgacttcaaactatactacaaggctacagtaaccaaaacagcatggtactggtaccaaaacagagatatagatcaatggaacagaacagagccctcagaaataacgccgcatatctacaactacctgatctttgacaaacctgagaaaaacaagcaatggggaaaggattccctatttaataaatggtgctggaaaaactggctagccatatgtagaaagctgaaactggatcccttccttacaccttatacaaaaatcaattcaagatggattaaagacttaaacgttagacctaaaaccataaaaaccctagaagaaaacctaggcattaccattcaggacataggcatgggcaaggacttcatgtctaaaacaccaaaagcaatggcaacaaaagccaaaattgacaaatgggatctaattaaactaaagatcttctgcacagcaaaagaaactaccatcacagtgaacaggcaacctacaaaatgggagaaaattttcgcaacctactcatctgacaaagggctaatatccagaatctacaatgaactcaaacaaatttacaagaaaaaaaacaaacaaccccatcaaaaagtgggcgaaggacatgaacagacacttctcaaaagaagacatttatgcagccaaaaaacccaggaaaatatgctcatcatcactagccatcagagaaatgcaaatcaaaaccacaatgagataccatctcacaccagttagaatggcaatcattaaaaagtcaggaaacaacaggtgctggagaggatgtggagaaataggaacacttttacactgttggtgggactgtaaactagttcaaccattgtgtaagtcagtgtggccattcctcagggatctagaactagaaataccatttgacccagccatcccattactggatatatacccaaaggactataaatcatactattataaagacacatgcacatgtatgtttattgcggcactattcacaatagcaaagacttggaaccaacccaaatgtccaacaatgatagactggattaagaaaatgtggcacatatacaccatggaatactatgcagccataaaaaatgatgagttcatgtcctttgtagggacatggatgaaactggaaaccatcattctcagcaaactatcgcaaggacaaaacaccaaacaccgcatgttctcactcataggtgggaattgaacaatgagaacacatggacacaggaaggggaacatcacactccggggactgttgtggggtagggggaggggggagggatagcattaggagatatacctaatgctaaatgacgagttaatgggtgcagtacaccaacatgtcacatgtatacatatgtaacaaacctgcacattgtgcacatgtaccctaaaacgtaaagtataataacaaaaaaaaagacaggtgtaagaaattataaaagtattaattttgggaactgataaatgtccatgaaatcttcacaatttatgttcctctgctgcagttccagccagtccctccattcggggtccctgacttcccacaacaacacacttcatggggggacatagggtgaactactacacttcaccaaccagccaggacacattccacacatcaagctctgagagggayggcagatggtcatcctccaggtccagagctatgcccactggcaggacatcaccaggcaccgcatggaggtgatcagcaacttttcccagcagcacttcctcggggaggtggattaccttgtgtgtgcagatgtggacatgaagttcaacaaccatgtgggtgtggagatcctctcttccctgtttgccaccatccatcctggcttctatgggttccatcgggacacctttgcctatgaatgccagcctcagtcccaagcccattttcctgagggtgaaggggacttttattatataggggccttatttggtgggtcagtgctggaggtttacaggctgatcatggcctgtcaccaggtgatgatgattgaccaagccaaccacatcgaggccctgtggcatgacgaaagcctcttaaacaagtacctgcttaaccacaaacccactctcccttgagtacatgtgggattaaaaagtcgatggagtatacgttggatgaatacctggtgggtttgtgcaccatgataaactgcaagagatctgtggtcttggtaaataacaatgaggaaatgtgaactgatgagggaagcttccagaaagagaccagagagggggtgattgccagtcagcccgwatcttcctcctgaaatgctaccctgatttaaaatcagctttacaataaagagtatgactccacctattttcgtctggttataaaaaattgctaatgcctctcatcatctcctcaaatttaggaggccccagcacaaccccgctaccacaaccaccaccctatacacacatttaggcaggccttattccacagctcatgcacacgtttttcagtttcacccccttgagcttctcactgtgttctcctaaaacactcttcggggtggaggaggtgagtggtgtctgcctgtcctgacagataagggatctgtgatgagatcttttccagagcaaggaatcaggccccttaataaagaagagtaggctgggtgcagtgactcacgcttgtaattccagcactttgggaggtcaaggtgggtggatcacctgaggtcaggagtttgagaccagcgtggccaacacggcaaaacgctgtctttataaaaatacaaaaattggctgggtttgatggcgggcacctgtaatcccagctacttaggaggctgaggctgaagaattgcttgagcctgggaggcggacattgcagtgagccgagactgcgccactgcactccagcctgagcaccagagtgacactctggtctaaaaaataaaaacataaagaagagtagatttgtgatcttggcacagaatgactgtgtaatgcaaatccaatcagtgaggcatccagaaatggctcagagaggagcgatgtcccagcagcctgacccctccccctagtgtggtgtcctaaattgggttagtccatttgcattgctataaagaaatgcctgaggctgggtactttacaaagaaaaggtttacttggctcatgattctgcaggctgtgcaagcatggcaccagaatctgctctgcttctggtgaggtttcaagaagcttccaatcatggtggaaggcagaaggggagcaggtgtgtcacatggcaagagaaggagtgagagagtgaagggggaggacccaggctcttataaacaaccagctctctctcatgtgaactacgagtgagaactcatttttgtcatggggagggcaccaagccattcataaaagattcacccccatgacccaaaccctcccactaggcccagttccaacactgggggccacattgcaacatggatttggagggaacacacatccaaaccgtatcataaaagcagttttcacagaaagcatgtaactctgcctccttttcctatctgattgagaaaaaaaattctgaggcctcacaccacccccaaatttaggcaggcctaatacgatgccatcctctagtctcccaccaacaccaaacacacactttcacacaaataagaaacacacttttttttttttttgagatggagtctcgctctgtcgccaagctggagtgcagtggcgcgatcttggctcactgcaacctctgcctcctgggttcaagtgattctcctgcctcagcctccctcccgagtagctggaactacaggtgcgtgctaccatgcccagctaatttttgtacttttagtagagatggggtttcgccatgttggccaggatggtctcgatttcttgactttgtgatctgcccgcctcagcctcccaaagtgaagaaacacatttaggcagacctgacttctggactcaggctcaagttcctgagttgccaccaccttgagctttttaatgtgcattcccagcttccttcagggtggatgcagtgtgtggtctcagcccaacctgggatataaggaatcagagatgagatctattccagaacaaggaagagcctcctggacacagtctcctgcctcctgtgacagtcacacaagggcctgtctctgcccttggccaaactgatgcacaaaggtcttcagctctaaatcaaattacttcctcttgttagagtccttgtaaaagctgaaaggccgtttagtgtgcagaagaacgtgatgccaaataaaaccctctttcctggcactgaagttcttgtttatcccaaaatattgccagctgtccaccaggggcaaagcgggtctctctcactctccccccacccactgatggactccatgccacctccattgatcaatttagtaacttattaaggacttgccagctctttaaaaactgaaaaaaaatatatttctagatgcaaataagaatcaattcaaattattacaaaaacttgcctcttaaaaaatttgttcattgtccttcagcaaaggcctgaaatcctacatggcaggtatctgaaatccagcattttcttgtcttgctttcttttggacatatcaggacaaacagtttgtccatctttctgttaggttttgaagggaaggaaagagttaaagaaagacggagaggctgggtgcgctggctcatgcctgtaatcccagcactttgggaggctgaggtgagcagatcacgaggtcaggagttcaagaccagcctgaccaatatggtgaaaccctgtctctactaaaaatacaaaaattatcaggacatggtggcacgcgcctgtagttccagctactcaggaggctgaggcaggagaatcgcttgaacctgggagatggaggttgcagcgagccaagattgtgccactgcactccagcctggcaacagagcgagactccatctcaaggaagaaagaaaggaagaaagaaagaaaggaagaaagaaaggaagaaagaaagaaagaaagagggagggagggagggagggagggagggaaggaaggaaggaagaagaaagaaagaaagagaaagaaaaagaaagaaaggaagaaagaaaaagaaagagaaagaaagaacgaaagaaagaaaagaaagaacgaaagaaagaaagaatggcgggcaggaaggagggagggaagcaaggaaggaaggaaggaaggaggagaaagacacagagagagagagagatggtggctctactgcaatgtaggttttatttggaggtgggggaccagcttaatgcgagggcgcactgctgcttacagctagtgcaattagatgcctgggtaggggtctgggggggtatggcttactacccaggaggatattgataagatgttcccataatgaggtggtttggccctttttctggcaggatgtgataatgaggtcccttggacttttttcccagcaagatgtgataagaaattcaggtggttagggcggggtgcagtggctcacgcctgtaatcccagcactttgagaggccgaggcgggcggatcacgaggtcaggagatcgaggccatcctggctaacctggtgaaaccctgtctctactaaaaatacaaaaattagccaggcgtggtggcgggcgcctgtagtctcagctactcaggaggctgaggcaagagaatggtgtgaacccgggaggcagagcttgcagtgagccgagatggcgccactgccctccagccattgctggaacacgaattaaaagaaattaaagaatgtgtaagcaaaaactcagctatatataaaaaaacccaattccccctgaggaggagaaagagctggagtccttcaaaattagctgcctgtttttccttctgtggctagtgagccttaactctccctttcccagacattgtgaagaccctgtttagctgtgcagctgcaaggtcactagacagataatcttaagtcttaatacatgtcgttccttgaaaagtaagaaataatgtaatgcatgtctcaattaaataactctctttgtttctggcttctgtaatatgcttccccctgcacagatctgcccccaccccacgaaatgcttaaaaggtagcttaactctttgttcagggctcagtcctttggatgttaatccgactaggtcagtgcacttaaataattaaataattcctcctcaacccctcggcctaattccttaattatcctgcagcagggtgacagagcgagactctgtctcaaaaaaaaaaaaaaaaaaagaaagtcaggtggttgggcagaatgtttctcacagcccgaacccctgtggaatgtttcactttgaccaaggtctgtgaaatggtggggggcttacaaaataatgcggtttggactaatgctttccttgtttttcacggccttggtagtcttcaagaggcctggccaggtggaatgccccccagtctgagtttgtctggtgcttccttaccatgagactggggtcttggagttttgaggttttggaaagacacctcagaagttaagtatctttcttgtcacattgcattaggggggtacatggtatcaatatctcttttctctggtgatgtaaaacttgatcatttgaataatgtagtctttcatggtttttttatccactgtaaagttgctatgtgttcctccctctactgtagtctttggaaaggagtcaccaagtcagcccacccttaaagagggagaatatttagtctccacctcccggaagaaggagcatccatatgtattatttgcaatttgtctgtaagataggtttgtctaccccattaaaaagtgggcaaaggatatgaacatacacttctcaaaaaaagacatacatatggccaacaaacatgggaaaaagagctcaacattactatcattaaagaattgcaaatcaaaaccacaatgagataccatctcatgccagtcagaatggcgattattaaaaagtcaagaaacaacaaatgctggcgaggttgcagagaaataggaatgcttttactctgttggtgggaatgtaaattagttcaaccattgtggaagacagtgtggcaatccctgtaagatttaggaccagaaataccatttgacccagcaatgccattactgcgtatatacccaaaggaatataaatcattctactgtaaagatacatgtatgcatacatatgttctttgcagcactatttgcagtagcaaagacatagaatcaatctaaatgctcatcaataatagactggataaagaaaatgtggtacatatataccatggaatactatgcagccatagaaaggaattagatcatgtcctttgcagggacatggatgaagctggaagccattattctcggcaaactaaggcaggaacagaaaaccaaacactgtatgttctcacttataagtagcagctgaacaacgagaacatatggacagggggaggggattaacacacactgggccctgtcaggggagggtgtgaggggagagcattagggaaaagagctaatgcatgctgggcttaatacctggatgatgggttgataggtgcaacaaaccaccctggcacacgtttatttatgtaacaaacctccacatcctgcacatgtaccccggaacttaaaaaataaataaaataattatttttaaaaagatatatttgcctcttcttggctgagtgtggtggctcatgcctgtaaatccagcactttgggaggccaaggcaggcggatcacttgagtccaggagtttaagaccagcctggccaacatggtgaaatcccatttctactaaaaatacaaaaattagccaggtgtggtggcttgcacctgtaatcccagctacttaggaagctgaggcatgagaatagtttgaacccaggaggtggagtttgcagtgagctgagatcgcgccactgcactccagcctgggcggcagagcgagactgtctcaaaaaaaaaaaaaaatttgtcctttctttcttgtttacttattcatttatttatttatatagttatggacttatgtgtcttattttaaactttgggtattaatccaataactttgggttattttggtgtgcatatctttccagcttgggccattaggagctcttcaaagaagatttctttctgtcagaggatttttgttttgttttgtttgagacagggtctcaccttgttgcccaggctggagtacagtggcgtgatcttggctcactgcaacctccgcctcctgggttcaagcgattctcttgcatagcctctcaagtagctgggactacaggggcacatcactacgccaagctaatt

SEQ ID NO: 94012 - DNA, 12667 bp, Homo sapiens
caaaattgacaccctaacatcacaattaaaagaactagaaaagcaagagcaaacacattcaaaagctagcagaaggcaagaaataactaaaatcagcagaattgaaggaaattctgacagaaaaaacccttcaaaaaattaatgaatccaggagctggttttttgaaaggatcaacaaaatagatagaccactagcaagactaataaagaaaaaaaaaagagaatcaaatagacgcaataaaaaatgataaaggggatatcaccaccaatcccacagaaatacaaactaccatcagagaatactacaaacacctctacgcaaataaactagaaaatctaaaagaaatggataaattcctcgacacatacactctcccaagactaaaccaggaaaaagttgaatctctgaatagaccaataacaggttctgaaattgtggcaataatcaatagcttaccaaccaaaaagagtccaggaccagatggattcacagccgaattctaccagaggtacaaggaggaactggtacaattccttctgaaactattccaatcaacagaaaaagagggaatcctccctaactcattttatgaggccagcatcatcctgataccaaagccaggcagagacacaaccaaaaaagagaattttagaccaatatccttgatgaacattgatgcaaaaatcctcaataaaatactggcaaactgaatccagcagcacatcaaaaagcttatccaccatgatcaagggggcttcatccctgggatgcaaggctggttcaatatacacaaatcaataaatgtaatccagcatataaacagaaccaaagacaaaaaccacatgattatctcaatagatgcagaaaaggcctttgacaaaattcaacaacacttcatgctaaaaattctcaataaattaggtattgatgggacgtatctcaaaataataagagctatctatgacaaacccacagccaatatcatactgaatgggcaaagactggaagcattccctttgaacactggcacaagacagggatgccctctctcaccactcctattcaacatattgttggaagttctggccagggcaattaggcaggagaaggaaataaagggtattcaattaggaaaagaggaagtcaaattgtccctgtttgcagacgacatgattgtatatctagaaaaccccattgtctcagcccaaaatctccttaagctgataagcaacttcagcaaagtctcaggatacaaaatcaatgtacaaaaatcacaagcattcttatacaccaataacagacaaacagagagccaaatcatgagtgaactcccattcacaattgcttcaaagagaataaaatacttaggaatccaacttacaagggacgtgaaggacctcttcaaggagaactacaaactgctgctcaatgaaacaaaagaggatacaaagaaatggaagaacattccatgctcatgggtaggaagaatcaatatcgtgaaaatggccatactgcccaaggtaatttatacattcaatgccatcctcatcaagctgccaatgactttcttcacagaattggaaaaaaatactttaaagttcatatggaaccaaaaaagagcccgcatcgccaagtcaatcctaagccaaaggaacaaagctggaggcatcatgctacttgacttcaaactatactacaaggctacagtaacaaaaacagcatggtactggtaccaaaagagagatatagatcaatggaacagaacagagccctcagaaataacaccgcatatctacaactatctgatctttgacaaacctgagaaaaacaagcaacggggaaaggattccctatttaataaatggtgttgggaaaactggctagccatatgtagaaagctgaaactggatcccttccttacaccttatacaaaaattaattcaagatggattaaagacttaaacgttagacctaaaaccataaaaaccctagaagaaaacctaggcattaccattcaggacataggcatgggcaaggtcttcatgtctaaaacaccaaaagcaatggcaacaaaagccaaaattgacaaatgggatctaattaaactcaagagcttctgcacagcaaaagaaactaccatcagagtcaacaggcaacctacaaaatgggagaaaattttcgcaacctactcatctgacaaagggctaatatccagaatctacaatgaactcagacaaatttgcaagagagaaacaaacaaccccatcaaaaagtgggcaaaggatatgaacagacacttctcaaaagaagacatttatgcagccaaaagacacatgaaaaaatgctcatcatcactggccatcagagaaatgcaaatcaaaaccacaatgagataccatctcacaccacttagaatggcaatcattaaaaagtcaggaaacaacaggtgctggagaggatgtggagaaataggaacacttttacactgttggtgggactgttaactagttcaacccttgtggaagtcagggtggcgattcctcagggatctagaactagaaataccgtttgacccagccatcccattactgggtatatacccaaaggactataaatcatgctgctataaagacacatgcacacgtatgtttattgtggcactattcacaataacaaagacttggaaccaacccaaatatccaacaatgatagactggattaagaaaacgtggcacatatacaccatggaatactatgcagccataaaaaatgatgagttcatgtcctttgtaggaacatggatgaaattggaaatcatcattctcagtaaactatcgcaaggacaaaaaaccaaacaccgcatgttctcactcatagatggaactgaacaatgagaacacatggacacaggaaggggaacatcacactctggggactgttgtggggtggggggatgggggagggatagcattaggagatatacctaatgctaaatgacgagttaatgggtgcagcacaccagcatggcacatgtatacataagtaactaacctgcacattgtgcacatgtaccctaaaacttaaagtataataataattttttaaaaaaagacaaacgatcatgctgaagttacagagaattttgtttaatgttggcttacactttatttctgcttcatataaaacatcttctcccaaaggtcataaatatcaaagtagatcatgtgtactagttctgcagataaatgaaggtagttagaaatgtacacaggaaatctatacaggggagaatcagaaaaatcttatgagcatgttctgaatacaattttagtgatcaggagcagtgtctcacacctgtaatcccatcactttgggaggccaagtggggcagatcacctgaggtcaggagtttgagaccagcctcgccaacatagtgaaaccacatctctactaacaatctgaaaattagccggatgttgtggcagatgcctgtaatcccagctactcaggatgctgaggcaggagaatcacttgaactcgggaggcagaggtggcagtgagccgagatcgtgccactgtactccagcctgggccacaagagcaagactccatatcaaagacaaacaaacaaataaaaaaaactcgcacaattttaaaggatgaatatggttgcaaattgggcaggttatggtctgagttatttcttaagacactgcaacaagtctgacgcgtcataatcacagatttctccagaagccaggaaggtgtcattactgaacagacaggatgtaagtcaggaggcagagatggagtcagagaacagccctgagctagagccccttccacagaggcagctttacccagctctaattgataccacacagcaacggagacacagtgcaccaaccaacatcatgtgatttttaaagataagacagtaatgaaaacttttagtgaactattccaatgtcaaactttatcttccaaaccaaacattataaataacactgtatatgctgaaaagaagcactgtttagccgagtacctgccctggggctgcagtctatgtcttttgcctcacactatagacacttgagtgcaagtctttctacccagtgtgcctgtcagcatcacagaggggatactctacgtatcattcacctttacattctcatcacctgcaaaaatgatctccacacaatatacatgaaaaaagaatttgcttcatgataaagctgctaatgaatgtcggccagaagaggacttcaaggcagagtactgttagctgtgcattgaatcctcacctgatgaccattgtgtccacatttacctaaggactccagtgataaaattattgcatttgtaaatgacaggaaaattggatggtatatgatatcatttaaaggtctgatttccattttctaatctagaagctagaccagagatttaacatctttttgtacctaggtcttacccctgcaattcactttccacctctgtacaattttcccacatcatcccctgtgcccagaatgctcatctcttccctaaagtccctgaaaaccacctgctttgcctttaggaccctgctgaaatgaaactttttttttttgaagtcttccttgtccctcaagcgaagtgatttccttcaccctcggcgtccccatgaaaccatgttcacacaaatgctattatctctatcatactgtaatacaattatgtgactacaattactttcctgtatatctctgaggtccaagaataagtctatgcttggtgtatgaaattgtacagttgacttctatactttcaggaatacagtgctctgtccttaaatgttcatttgtaaatacagaaccattttcttgttgatatcacaagatgaaacctaccaggaagatgaatgacaaccccagaacacactgttttgtagaaaataccataggctgaaaagatcacaggaataccgagtgctaggttggaatctttcatgacaccaaatgttcattcattctctgccagattttacaactgtcctcggtgtgtttttaggttgtgtaactttacacaaagtggaagcaataatcagggcaagacttaagagaaagtggatccaatgcaagaggagtaaagaaaaaaatccctcaaatgtatggagcagattgttttaattatctacagaatcttgtgccccaagaaattaatagctcaagtttccagcaagagtggtggatgagatggagagcatttatgtgagagagaaccaaggatattactaaaaatggaagggaagctgggttcctcctgggaaaacagatctctgtggctctatttgttctaactactatgcctgccttcatgtactttggtcatttaggggcctgccagaggacagttataaaatctgtggtcattctgccggcagcatatagttttcatccagagtccagatcccaccggcaaaactctgtctaacacaggatgacttggaattagagtccgtatagcagaaagagcagcagggctgtccttgggtatccgttgctcagccaagtcatcaaataaaaaggatgattgcrcaagtggaccatgtgtcaatctgtgggtttctgcatggccaagagccagaccctccctcctggctctgctggcccaacccaccaagggatgctttatttaaatagttccaagtaggggagaccagctgcccctgaaccccagaacaaccagctggatcaattctcataggagccacagcgcggagactgtgtaagtcaacaatccccagagttgggacaggaggggcagcgacagggcagcaactgagggagaagggagctgacgttagtgcttaggagatgtggcacactttggggacaggaaggaacaggaaatgggacccaagagtggcagcagattggcctgtggggtgagacactatggtgtgtgtcacaaccgagacagaatcggggagtagttacttctcttcttttctcacaggaaacatggttccaaaactgttcacttcccaaatttgtctgcttcttctgttggggcttctggctgtggagggctcactccatgtcaaacctccacagtttacctgggctcaggggtttgacgtccatcagtaggaaccagctccaatgcaccaatgcaatgcgggtaattaacaattatcaacggcgatggaaaaaccraaatacttttcttcttgcaacttttgctaatgtagttaatgtttgtggtaacccaactataacctgccctcataacagaactctcaacaattgtcatcatagtggagtccaggtgcctttaatgtactgtaacctcacaactccaagtccacagaatatttcaaactgcaggtatgcgcagacaccagcaaacatgttctatatagttgcatgtgacaacagggatcaacgacgggaccctccacagtatccagtggttccagttcacctgsataccatcatctaagctcctgtatcagcactcctcrtcatcactcatctgccaagctcctcaatcatagccaagatyccatccctccatgtactctgggtgtcagcatctgtcctcttcagtctctatacyccttccacttgcctgagctgaagtgccttgtgaagcctgcaataaactgctttgcaaattcatctggaagtgtctgtgtgtcttcgtcggccactctgctgtcattgagtgacaatctactctagatatttttccttcctccaacccgagacttgtgggaaatggagagatttgaggataagagactctttctgtcatgaagcagcacagacttatccctctccctgctttaggctgagaagccgaggtctcaactgatacctaccaactgttgaagactcttcccttgaccaaatttagtcatctcccctggcctcttcacaagtaggtcattctgttgggtttcctagtccttccttgtagagtcaggtttgtatttatatttacatttatatttatatttatatttatatttattcattttttgagagagagtctcgctctatcacccaggctggagtgcagtggcacaatctcggctcattgcaaactgtgcctcccaggttcaagcgattctcctgcctcagcttcctcagtagctggggttacagtcatgcaccaccatgcctggccaatttttgcaatgttagtagagatggggtttcaccatgttggccaggctagtcttgaactcctgacctcaggcaatccgcctgcctcagcctcccaaagtgctaggattataggcgtgagccaccagtgcccaacctagggtcaggtttaacagaagtcttcctaacctggtttatcattaatattcaccctcaatatctgaccaaattccttaattcccccatcatcctccttgtgatacctgattcctggcctgccttcaaaaaaaaagaaaatccagttgagtcgacttagcattggtctccctagcctcgatggttcttctaggtaattttgcatccagtgacccctccccccacaccaacttataacttcagtatacctctccacttgttttagctgtattccagaattttgctcaatttggtgctgaggtcccatttgacactttatggtctaagtctggtttttattgacatgatttctatcctaagagatatagaggctgcagggaataaggtgaaaatgtacatgtttgattatgatttatgaatgataaattttgatagaattgaacattgagatagaaaacacacaaaaaaagaaagtagaaaaagccaagaatgctataaatatggtgaaaccaagataaaaagtttagcctcagacctatttcctttaaatgggcacatcaaatctccagctattagcaatcgtactagaggtggatccacggtttgagtcaaatatggaatgagataaattgttcagacagcaatatggacagattgtaataaatattgcctgaaggagaggtgcgcatcattcccaaaacttccatgtcctggagatagggagtagctggtcacctgggaaggggaaggggaacgagggagactggggagtgggatcactcatgaaggtgaattggctcctgcccgttctgccctccacagttgtccccaaaggtgagtcaaagggttcattcaacacctgtcaggtagggcacagcctcaagaattagggatttgtagacccagagagagaagaaatggataatgagagcccttgccctggactccattacagggcttcactcagggatccatgagaaacaggaaggggaagccctttcttgcaagctgtggacaggtgcagcattcaagtgattgtgccggggacagagtgggtctttttgaatggcctgactcttggccatacaacagagatacaatgccatcagatctgcaccttggtccttcagtctgagagttctgacttctatatttctgctcctcttccagaccctcagaaatagcaatttccattcctcagatgactccatgtcagtaatagtagctctcattggcatcagacagcagcagtattgaagtctctcctctggagaagctattgagatcttgcttctccaagggtgtggcagggctgtgaactttaaagtttgcacagggacacagatttcacgaaatcctggtgctcaatagaatccactgactctaggtaaaatagggcatattaggaagtgagtgcagtcttcccacaacctccaagtagcagaaggagaaggtgggactctgaaagctggagccacgtttcctgtgaagagagatggaatggaccttcctcacttcaggtaccagatcacaggtgtcttctcagtcagggatgccccgtctctaaaaccataggatagagggatcagtccccacctgcccccatgccctctccaccttgtgacttcatctcctctcctgtcattcatccttcactcattcattcatccagcagacatctactgagtagataccttgctccaggcacagtttgagggagtgatgacgcaacgcaaaccaagacaggtcactgctcttttggggccacattatacaaggataaaaataaacatacaaaattgttctaagcatacaaaattttgctaagtgtcaggaggaaaaatacacagcctagtaagcagaaaactacacagagcgacacaatatagaggttctgtatgtgcctcagaagtgacagagcaaagtgtgaccaggaaagacccatttcagagaatgaaatctaaacaggaggaaaagcagccagtcatacagacaccagatggaaaatcatcccagcaaagagaaggagacttcaaaattcctcacaaatatcaaggctataagtagacttcagttcagtgcttacaataagttaattaaaacatctgcaagaaaatgactacaactatttgcatctttgtatgtatttattccttaatgtaataaaacattttcatttttaaaaaatggtcctgaatgaatagaggtttggcatgttagaagcacaaaagttgtttggtcaggacaagatcatcatagccatgagtattaatgataggagttaatgaggttcagacccttcatgcttgtgaagatagaagaataaagtaagttcctcatggggcacaaattgagcatgttacatgcaagaataacgttgcctaaagatctgtccagcctctgtgcagaacacaactatttaggagacaagagtggaagcaaggtcccagtgaaggaccacaggttgaggcagagggaaacaagagtcttccaatctcagtgaatctcaccatcatcctctcatgctgcagccccatgctattcccctccctgttgccatggcctctctccagcccctccatgccttccacatcatcttcctgccatccccatgctgatgactgggctgaggtcagaggcagctcccctctcccaggacgtgagacgattcaaacaagaccaaggaggattctgtgcttgaccatcaggaaaccctggctggactcactgccccttctgcagtagacatccaagattttctgattgccctggacccaaggccagcaccacagagactaccattagagaagttaagtagtcacatcagcatgttccaaagacgtgatccttggattccacttcttttccttgaacctcccatgtctgattttataaaattctcttaatatcaaatcttcaggaagtcttgcaggagtaaatgcagttaattgttctataagcaggcagggagggtctccagggattataagaatttaaccaacttgagcaatcagcctgttttacaagcttgctggtgggaaccagctcctggcataacccagcaacttacagacaaattaggatgaacattcctcattaccatgctaaagtctccacccaaggaggagctatagcctcattaccatgacatgtgaactatgtgctggcagaatcactcactgtgtatgggcaactgggactcctcctctacaagtgatgatacaccctctgccctctccatcaccacatagaatgttcttctcactttccatcaggaagacactgctttggagaatactcccagtggccttcttacttgaaccaagtaacaaaacttttatttatcaaaatgtacgttctcatagagagtctttgttactcaccagggaaacaagccctagttttttcagctaccagctctaacacattctgtaaagtccagcacagaaggaaggttaattcacaatgctattgctttcactttttaataattgggaacatatcagggcagatgtctttatgtagggttaaatggaaggtcaaggaggcaaatcatcaaccttggggagacacacttgcagagattatgactacacttgggattcaagaatatgagaccccaccagcagagtagcctgcaatgttcaaggatatccaagtagatcaagtattttaatgaaaaaacaacaggctttgtctttcaagatgtccatgaattgactttccagaagagaaggaagaagacctcattgtcagggcagaagagagaagaggagagggatctaggctaaatattgtaatcgattttgcctgatattgactttttgtttgtttcttagttcattttattttattttattttatttttttgccaagactggagtgcagtggtgcagttttggctcactgcagcctctgcctcccaggttcaagcgattctcctgcctcaacctccagagcaatttttgtattactagtagagacagggtttcgccatgttggccaggttggtctacaaactcctgacctcaggtgatccgcccacctcagcctcccaaagggctagtattatagacatgagccatcgcgcccagcctcttagttcatttttagagatgaagtctccctatgttgctcaggctggacttgaagttctagactaaagcaatgctctcgccttagtcgtgccagttgttgagactataaatacacaccactgagcacagctgatactcacattttatgagctgtttccactccaattacataagggagtgaggcaattagtaaggataggagcatagaaactctgtctacatctctatttcaaattacctctgaaaaacagccttgtttttaaactaaaacttgattttggttaataaatgtttgtcttaaaatgcacttagaattatgacagagttgtcacttttgtctcagttctgacctatagtgatttcaaaagaagatcagtagactacttcaaaattctcattattcaaagttattttggatgtaaaattggctgatgtgagataatttagaatatagggccagccaggttacccaaatgaatatctgggaaactgagcacattacatgcttatcacacatccccactgagttagaaaatatgactgtattagtcaggatcatcaagagaaacataaaagatttaggtagacacagatagatagaaatatagatacagaaggatttatcatgagaaactcgctcacgcaattatggagtctgtgaagttccataatctgccctctgcaagctggcagacccaggaaagctggtgggataatttggttcgagtcccgatgcccaaaaaccatggaagctgatgatgtaaatgtcaacccaactacaggaagatgacataagatgtcctagcttaagaagtgaggcaagaaaaagtgatgaattccgcctttctctacttttcaatctattctggccgtcaacagattggatgagccccatccacactggaaatgcaacctactttacttaatcaaccaattcaactgctagtcttacagaaataccctcagagacacagccagaaataatgttaatctgggcacccacaggcccaggcaacttgaaatataaaactcaacatcatgatgacctatggtttcccaggtgcaccagaagatgttaccaaaatggcaccatcagccagaacccacatacattcaccaggtcagtgcatctctcagttcaccagagattcattttctttgtgacatcacgttcacctggagtgcagccaagaatcaggccacagctaataatgagaaaggaaggattcttcatttgcctttttacaaatgacagaaaa

SEQ ID NO: 94013 - DNA, 13039 bp, Homo sapiens
tatcttgcttttttttctttctatattttgaggaaactgggtgattggatactgtggtttatactataatccagtcttttgctacctgatgcctttcattagtttatttttagttcattagttaacaatctccaacagtgttagccttgcttattttccgctttcctccggtgttaaagcctaatcagaaaaaatgagcatatttctttatttttagttataatgttagttgaatcatatgaaattatcctttttgtagatctgaaataaacaaatagtggaaatttcatatggtccaaccagaaaactttaataatggcagggttttatcttaaaccatccttacaactcatttcaaataattctaatcactcaaactgccctgtcccctccactggtttaatttctggtttttgttttgtttttaaaataacattgtttaatactacgttctctagaggaaaggtccaaacaatgccaattcaatatacccaccaaataaaccattaaagttaatttaatcgtatgaaaacatctagatttccttcattcactcaccttttaattcattcaacaattcttattttattttattttatttatttttttgagatggaatcttgctctgtcgcccaggctggagtgcagtggtacgatctcagctcactgcaacctccgcctcccgggttcaagggattctcctgcctcagcctcccaagtagttgggactacaggcacgtgccaccatgcccagttaattttttgcattttttagtggagatggggtttcaccacattggccaggctggtctcaaattcctgacctcaggtgatccacccgtctcggcctcccagagtgcattcaacaattcttattgataattattgcacattgactctgctccaggtaccatgctaagtgctgggtagagctgtgagcgtgacaggggcgtctttgttttcagggaacttaaagttgttttttagaccggaagacatactatgtacatgcgctgactaaagcgatcattttgttttgattaacaggtctaatgaccggtttaatttttttttttaaccatattgaatgtttgttcaaagtgacgaacaccatcactttagtgttaataaaaattagccttggccgaagcagagctaagaaatttattttgaactatttccggtatttattaaatcaattatctgacctatataaggtcctaagccttagataaataaggcttgggagaaacgattcccaaagtgcgtgtttggacaactctaatctaagagagttccctcagggcaactggacccttctaagtaaagcacaagacacaatgctgggtaacttttgactggaaaagtatatatccaacaataattacatgtatttttttaaagaacaaaagcaaaaatacaaagaatttaaaattaaatacagcagtggttattcacctaagccagagctccccaggaccgtttctgggggatgcttagcagaagcagatgtgatctctaggctagtaagcctgagaaacgctaaaattgaaaaatgaaatagctcatttggatgagcagagctaggcgaytggagggcgaaacaatctgatggtgaaaatgccattgatgaaaaatttgtactggtatcacttaaaagcttgcctcacattcacctcccagcaattttagcaaagatttagtgttcaagaagtttgcatttagatactcagtcgctgtgcacccacaatagccctttggcttcagaatctaggtggccacccggaccagtgatgactgggtggattttgtttctgattcctttcaaagtaatactttgaaaaacttttgtctatgagccttatctaagatagctaaaatgtcagtctccacagaggcaaagtaagtggcactgagaagtaaaaaaatccagccaatccccctgccccctatttgtggaaatggggcacagcccccatcttgcatatattttttcagacatgtttttacttcgggagaatattcccctacagagtaagtatctttaaaaaatgaaaatggtggatgtaacagtcatcctatgaccagccagagctttgctgctttttcactatcgggcctacctctgcaatcattgttatgtttctgtgctggtatgggtgtgcccagaaatcagaagagggatgagttggattgcaacagatggagaaaatgcccactgctgctttataacatattgaaagcaaatgaagaatcccagccatgggtttccatctcctgttttgagaacaagaagacagtccgagatgtaataatagtaatagtaaatacaatgtttacttattggctgtctactatgtattggacacattacattacttctcattgtcacatctctgcaaagaaggtattacaagtctttctttagaggtgagaaaactgaggcccagagaggttaagtaacttgcctaaggttgcacagctaggaagcggcagcactgggacaccacctgaaattagcctggctctttctaccacgtccagccaccttcctaaaagcagagccactcacaagcctggaagctttgcattccccaaggctgcatgtcagagctccatctcctcactgataaaagacaaacaccacactgaccgctgggtgcattcttggctactgcagagtagggagttagaggcactgagggctctgcaggcacaagtgtgcccatgccactaggcacgccatcttaggatcttctggcctcaagccctggtgactgtcttggtagattctctctcagggaggcctcctcatgtggacagaccaggtcatcatttgctttgatcctaataatctgggcatttccaaagaaatgcaaatgcaacagcttagtaaaaagtagacattttaaaagggatgtatgcaatgggtcacttaactgagcaagaaaagagagaagacctgactgaaattctatgtgcggcctttcctccggggagactgtggaggtgtcccctcaggcagcaaaagcaccatcgcagccctcggtgtcaaggcctctctgagtcgcgctttgccttaccgtacctcgtttctgggctaggatattttgaaacacttttgtctattagctttatctaaaatagctaaaatatcagtctccatagaggcaaagtaagtggcactgagaagcaaaaaatccagccaatgtgcagttttctcctcctgccccctatttgtggaaatgaggcacggcccccatcttgtctgctgggtggggttctgtttaccacgcttggcagccaccgccacccaacaatctttcatttttctttctaacttcactttgcccctaccttggtctctccaagccgaacacaaatggaccagtgaggaaactgcaggtaaagaccctgaaaggttatatgagctccctggtgtggtgtctcaagcctgaagctcagaggctggagctattgcccctggctgtctcccctgaagtcactaaattccagcgttctgggtccccttgtccccagcacacaaggatgggctgctctgagcaagctcaggcaccctcactctgccacactgtgtgtgtgacttagaccccacaaggcttttctgagaaaacagctgtgacctgacagaaacccctgcagctgcacgggcctcagaatcccccgaggcgctggcccgggctgtgcctggctccctggtgggagcagaagtgcccatggcctctcctgccctcccaacagggcccctaaacaaattcccacacccaggtgagytaccaggagcgatcaggtgggccgaggacatttgcttgcttcaccttccctgtttctttagattgaaattcagcctgccccacttctcaggaagatgccacgaggctgatccccctgagcagtttgtcctgtcctcttttcactggttttcttcctcattacctgggctagaaaacatggtggaagctaaaggcttgcagcaaagctgggctcccacgatcgggaatgaggtgaggagcaagcactcttgttggctgggcgctgctcgtggtggtgacttaaccaggcacatcgtctcatctgccccgtgttctgtcaatgccgggccctctggctgggctagatggccgcctaaggggcaggctggggtgagtcacggagcctgggatggtgcgtcacccggcagtcccaggcgtgggtgtggggacagccatgacaaggctgagcctagacacggacgcttggccatgaggtggcgaaggcgctgtggaggctgccacccggtgcttcctgcctgtgcccctctcctccttggttaccccacttactcccgggcccattggagtgtttcaggccatgaccttgactgaccaacaaaatcttctttgttggcaaaggaagaaagaaaggggctgagtgacggagccagccagagggtgaaagaagctgaagggactagaacgtcgcagcacgaaacatggcctggctgacattttccgatcctgtccagcttctgtgaaacactccctctccgtttctctaccctgggcctgcctcggttgctctcttgcttccttcttccttcctctcttatcactcgaaaaatctgtacctggaggagctgtgtattctagcagctggctctgaactgatgcccaactcggctgtgacggagcagatgccagcaccgggccggacccctcactgctcacttgcccattgatttgaggagggcaggatttgaaggagaccccagcccctcaccaccctccactacccacacccactcccctacacatacacaaagagtttctagaagttccctgccgtcgacacgtcggccctacctgtaatcggcaactgtgcctgcaggatggccgcggtgaaaagcgccttccacttcatcttgtcctttccctcagaaagaggctgggaggcagaggctgaggcagcggtggccgggacggttaggagaaaaggagtctctgctggttttattctgcagctacctccccaggaagtggaggactgtggggcctttgagaaagcacctgccgacasggccaagaaattcgcactcccyctttcggttcacaggcaggaagccctggaggtttgagggtttggggtgtgtgtatgtatctgtctgtctgaattttgmtttttctctcatttgaccattgttttaatgctcctttttttaaaaaaaataattcttatctaattcctatcttgattggtaaagtccatctctaggcaaatacaagttctcgatggatgtaagaacatttgctgttttcctagactgtcaaatattttatggtggctggcaaaatgacagaaccctggattagagtccaggacaaatgtagagacagattccttgggctttagtgacatctctgcctaccacctacttgctgtgtggcgttgagtcagtcactcaacatctctagacttcagcttccttatctataaagcaaagagctggagtagatctgaggttgcagatctgaacttggcctgaatttggatcattgtgtgaaatactgtagctcacatagtattttaaacacttgtgttagttgtcaacatttaaacaccagagtaatttacaataataaaacattaaaacctagacataaacttcgtctaaaaattgtaatatatctatatgaaacaaactttaaaacattgctgaagaacgccgaaaggacttgggtaaatggaaaggcatacccttctttgataggaagctctcttttaaggagaccaccattctctcttaattaatcaatctatttcattgaaaataccaacaaaaagttttagaacaagttaagctgattccaaaattgatatgaaaaaaattaatgtacaagaatagccaataatccaaagtcacagcaatccaacataaaattgataaattggacttcatcacaattaaaagtttttgtgcatcaaaggacactatgaagaaagtgagtcctgcaaatcamcgcatacctctaagtgatggaaacagcattcccatcatcagacttggtacctactcagagcctaaattgacccctaagggggccratgacttactcaaggccacacagcaagtaggtggtaggtagagatgtcactacagcccaagtagtctgtctctacatttagtctgagtcttcatcagtgaaggttgtcattggtctggggtgctgacacactgatgaagcytacatataccaaaatgaagacacagctggggaggccatcagggggaaaatagcagaaggaaaggtgcagaggaaggatatcttctactgtggaaaactgtgggctacaaatcacaacccagagctggtctgcccgagcctagagaggatgctcaaggtcctccagctagattgtgtggatctttacatcactgaaatacccatggccgctaagccagaagacaaaatctaccctataggtgagaatggcaaatggttatatcacaagtcaaatctgtgtgccacttgggagacttcggaagcttgtaaagatgctggcttggtgaaatccctcggagtatccagttttaacagcaggccagctggagctcatccagaacaacccaggactcaaacccaagccagtcagcaacgaggttgagtgccacccatattacacccaaccaaaacttttgaaatttcgccaacaacatgacattgtcatgattgcatatagccctttggggaccactaggaatccaacctggacaaatatgtcttctctgccttcgttaaaggatgcacttctaaaaaggtgcaataagatcacagctcaagttattttgcgtttcaacatccagcaaggggtggttgtcattcctaaaagctttaatcctgaaaagatcaaggaaaaccttcaggcctttgacttttctctcactgaatcaaggacattgaagcctggagtgaaaatgtccgcttcatagaaatgctcatgtggtgtgatcatcccaaatacccatttcttgatgaatactgacttcagagagttcctgaacagattctcccctcccacgtgtggaggaccttagggtgcatagttccccatggacacggaaatgaaagaggttttattatctgaaaagtggtgatggaaacatgcttaacttttgtatagtgtaagtgattttaactcacccatgttaaagacaaaatgtttaaatctgttgaaattcttaggaaattatcacctaatattttattagataaatgtcttctgggttccagaccaaaaacaaaacaaaacaaacaaacaaacaaaaaacaattagattccagaaaagacttgaaaggcaacagatgacaaccagcaacaagtaactcatgaatgtgggtagtaacattgttagcctgagttctttagcagtcaacaggacaacaaagacagcagagggcccccatgtgccagggtgctggcagtggccttgaggacttgaaccattgactgcaatacagacacagccaagataagatccagacatgcattattaacaaaaaagtgatttgctgcaccttgagtagggagagagggctaagtgtagaaaagtcttaaaatagagtcaattaaacaccacagtgatcaacaaagccataaggattttattgttgtttgtttctatccgatgtatgtttgtttagcttttactcagcttgaaggatgcatacttgctggttctcttttgcatcctcagagggtctgagtttcaacataactagtggtccatacttacattgtcttatattcactcttgccacattgatcatcgaatcaccattacgtgaagtggcttgaaacaaccaacatacataaataaaactctgcatcataaagtattccaaagacggctattttaaaacaagacattttataaggggactttaggagacatattgaaagaagaggctttataaaagtactatgcttaagtctttaagagtgttattgggatagctatgtgaattttgagaaaatagcacgttcaaaagaacactggtaattgtactctatgtaaatttttaaagagaataaaattattagaattcaacaacagagatgtacctattttcagttcaactacagaaatatattttattcattcatattagatcactctcacagggcaagagagttcttcaaaaattatgcttttccaagaccaattgcttatagataatcttcaatgacctgtacacatacatttctgagaaagtatcacttaaaaacttgatctatactgattgttttcactgattccgatgttaatacttacaatgcttgtcctctagacaatactttgttcacaagaaatcatgaaatatgatgacaaagaaagacaaaagaaagaacgaagaaagtgaaaagacaacccaacccacagaatgaaagaaaacatttgtaaatatactgataagggtctaggattcagaatatataaataacccctatgactcaacaataaaaaacataacccaattaaaaattggccaaagatgtaaatagacatttctccaaagaagacatacaaatggccaattagcacatgaaaagatgtacaacatcattagtcattagggaaatacaaatcaaaacgacagtgagataccacttctcacccactaggatagctaaaataagaaaaccgacaatacaagtgttgataaggatgtggagaaactggaattctcatacatttttgtgggttatataaatggtgaagcccttgtgaaaaataatttggcagttcctcaaaaagttaaacatagtatcatgtgacccagcaattctattcctagatatatacccaagagaatcggaaacctaggctcacacaaaaacttgtaaaggaatgttcatagcagcattattcacagtggccctaaactggaaacaattcgaatggccacaactaggaatggataagcaaatgcgccgtatccaaacaatgaaatatgactcagccatcaaaaagaatgaagcactgttacatgctgcaactgggatgacccttgaaaacattatgctaagcggaagaagccaggcacaaaaggttacatagtgtatgattccatttatataaaatgtccagaataaacaaattcatagagatagaaagcaggttagtagttgccaggggatggggagagtggggaattgggactgtcaatagctatgagggttcctttgagatgatgaacatgttctagaattggacagtggtgatggtgtgcaacagagtgaatatactaaaaaccattgaagtatgcactttaaaatgacacattttatgttatatgaattatatctcaatacaaaaataatgctaaaacaaacacaagaatagtcaggaaaattcttgcaaagaagagtaaagagagtgaaataaccctgccagatatcaaacaataaaaggggtgtaattatcatacagtacttagggtactatagacttaaacatatatggtcaattggttttcaataaaggtacaagaaaaattcagcaggaaatggtagtcttttcaacaaatggtggtagaacaactggatatccacatggaaaaaaaattgaccctcggttcataccatacacaaaaattatctaaaatggttcatagacctaaatgtaaaacccaaaactataaaatttctggaataaaacataggagaaaaatatttgtgatagaacacaaaaagtaaaaaccataaaagaaaaaattggtaaactggacttcatcaaaattaaaagtttttgctttgttcattgaaagacagcagtaggaaaatgaaaaagaagccatagactaggagaaattatgtccaaacacatacatcagacagaggacttatatccagaatatgtaaagaactattttaactcaatagtaaagtaatcaactcaataagaaaatgggcacaaagtttgaatagacaattcccaaaagaagataaatgaatggccaataagcaagtgaaaagatgctaaacatcattagtaattaaagaaaaacaaattaaaaccacaatgagatactactacatacctgttagtatcgctaaaattaaataactggtcgttatcaagtgttgcccaggatatgaaagaactgaaactctcatacgcggatgggggaaatgtaaaatggtacaacaatttctgaaagatctggcggtttctttagaaagttaaacatacactcaccatatgatccagccattgcactcatgtatctaaccaagagaaaaaaaaaaaaaaatatatatatatatatatatatgtccatataaagatttgtacatcaacactcatggcagctttatttgtaataaactactggaaaactacccaaatatttatcaacaaatgaatggataaactaattatggtatatccattcaatgaaataatactgaacaataaaaagaaataaactgctagtgcacacaacatggctgaatctcaaaatcaatatactgagtgaaagaggccaggcaaaaagagtacatattgaaagattctacttacaggaaattctacaaaatctgaattaatctgttgtaacagatttcaaaccacaaactaagaaaggtacttgcagcactgtgacaaagggcttagttccttaatacataaagagcacctaaacattattcagttttagcaaataattttcaagtgtccaccaggtgccaagcatggtactatacactgaagatataactgggagttaaatagacaaaatccttgccctcgtgaaatgttcaagctgacgggagtctaaaacaacgttaaaaaaatgagaaaaggacttgaacagagagttcatgggaaaaaaaagtaacacatagctgtcaaatgaatgaaagattaccaaaatcactcatagtaggaaaaaatcgaaattaaaattacaatgaatacatatcagattgctatcagcttctccactgggttccgtcctcctttgcttcccaaggaaattgccccagaaattctcttttttctctcctgcatgtcagtattttcctctaaattggatcattcctatctgtatacaagcatgttatttctctcatcttaaaaaactcaaagacttatatagcatttgcacattggaacttgccatatttcttatcgctttgggaatccagtctccacactaagaagcctgtattaacccgctggagacacgtggcacagctgacagccagcgctgacttccagacaagtaaggctctcttacrtcatccagacccagctgaaccaacagaggactgcagccacgtgggtgacaccagatgagactggacaaagcactgcctgagtccagcctaagttgctggccgacagaatcatgaactaaaacggttgtcgttctaagccactgagtttgggaggattgtgacataccaaatgataacaaaatactcaatatccccatatcaatctcaggaattgccctaattggcccaccttgggccatatgcccactttttggataaaccagtgcttccagggggtcaagacgagattggagctggaaaactctggtttacagccttagcagaatcattcgtaatagaagaaatgaggggaaaggattctgggcatatatagaacaatgactgtccacgacagccagccttgccctggtgtgtgcagtgggatggggttggcaactagaacgaggctcacgctttgcagaggggcacacaggcaaggcycagagctggagctgagaggaagctggatagaacatgatgacctgcagctgtgagtttctcatgggggaagctctggctcttcctcatgattgaatccctgcttcctgatatattttggtgggtgggtagatggatagatggatagatgcatgcatgcatggttggatggatggatggttgggcgactcagtgagtgagtggctagatggatgaatgagtaggagggtggctggtaacattcaggatggcaggaagtccaatactatgtaggaggatgccccaacttcctctcaggaagagcacagtaagggaaacccagaagctggtgaatggagattttagctggaaaagttgtcattgtcattacagagaagggcccctgccattgaggggctgactggaaaattgggtagcgtaaagaaaatgtaaagacaaggtatgggggaagggactggggctcaggactgggactgaactgatggaagccaaatggctacagctacaagcaggaacaatttaaagtgtagggccaagcacaatataagcagccatgtggtaagaggaagatgctggtgctaaataaattctcataattctccaaataagtaatgctggtgaagtaattattttaacttgtccagcatctttcccctcccttttttggaagcaacctcgtttcccttggaggggagcgcatattccctcaacggagtgggatgtatgccgctggctggctcccggtgtgggcatggaccctgtgacagccaatcaggcatcatatccttctgtctacaaagaccggctcagggagggcccatgagagccattttcaagattcttgctggaactccagggaaaggggcaccattttcccgtagagaatggtgaccgtggggtagtgcagcctgcagcagtggaggccgtctatttcccaccgggagagagcctgacgggatgaggccaacaagagggaagcagagcccagagacaggaagaagatggttcccattttgcccccttgtcagtcacaggagccaataaatacccctttttgctctttgggtcgattcatcagaatttagtgggaaagctttgtctgcacctagaggagaggttgttctgaggcgccaacgtgcttcaggtgagctgggtctcttcccacaaccacttgctcccaaggggccctcccaggattcagatttccctggggttctttctctacaacagctccttctaggcaacagggactcggcactga

SEQ ID NO: 94014 - DNA, 13110 bp, Homo sapiens
catttgcagtcaaggatgcatattaaagtaacaatgtacacttcttaccattaaactgacaaaatttagagtgacaaaatctactgttgacagtgataggctactttcatacctttttggtagaaatatgaggtattacagccttttaaaaaagccacctgacaatatttgttaaaatttaaactacacatacccttctaacacgtgttcccaattctggaactctatcacatagatataaaagcagaagtatgtaaatgatatgcttacacagatgtattaacagctgattttcattactaaataccagaatgaccatgccatttgtttacagatggtaaacaattgtcctatttgaactagcaaaacctctggttggttgagttccgtgtcatactgcttactgttatttttagtatcactccagtatgtaatggatatatatgtctatgtaggtatgagtgtatggtttgtagtggcaaaaaaataaaacctcagacaagttaaatgttcactaacagaggaaaaatggttaaatagatggtacatctatattacataaaacattttgtagccgtttaggagtttgattgtgatggataaaaataagataaagaaagttgtagcagaaagtgctagttgccagcatgatatctattcttcctcagtatgaaacaagacgctgtttgttagtgtgtgtgtgtaatgtatccagttaaacaatgacacattccagctatgtttgctgctagcagtggccatgtcactaggttatagctaatgataggtaggtgaaaattgttgggtgggctttatgtgaaatagcttgcagattgtaaagcgtcttctgcttctggccatgaggaagtaattgagtccagaattatgcttccactatagactattagaaaactggaccaataaaacaaacaaacaacaaggaaaaaaacggttttaagcattggaaaatggaaagctcagaactataacacctgaaagaagtgaaagaaacaaagtgagccttaggcaccaaagctttactctcacagacaatttttggactgtggcaccaggagggaacccagacaaatcatgacaaactgttaagtaaaagagagaccatagttcaagggagcttggattttggcatagagtaaccaagaggagggagaaagagaggaagacttccagatatatgtatagttgtctctatattgtcctatttgaactagcaaaacttctggttggttgagttccgtgtcatactgcttactgttatttttaatatcactccagtatgtaatggaaatctgtgaatggtagggtaaacctccaagaggctgggcaagaacagcttcttggagaaaaaaaaaaaaacagctgctaggaagaagacaaaaatattcctagagatcacactgagctagagattattatagttcccagagcagccagactggaaagatagagagaccacattgagtacacagagcatttagtagagaacccagaaaggccatgccttggaagtggggccaagttagccctagaataaagaagactatagacttaccctgaaagaacttaaaaacaagtttcaaaagaataaaacaacacaagtaatttaactgctagagagaacaaactccaacaatctttttctttttaatgcaaaaaaaaaaaaaaaaatccagcaaccagccatgtataatttacaatgtccagcttctaacaaaaagtgttaaacattgggcagaaaaataaggcccataacctggtgtattagtccgttttcacactgctgataaagacatacccgagactgggcaatttacaaaagaaagaggtttactggacttacagtctcccttggcttgggaggcctcataatcatggtggaaggtgaaagacacatctcacatggtaacagtcaggagaagagcgcttgtgcagggaaactcccgtttttaaaaccatcagatctcgttagacttattcactatcacgagaacagcacaggaaagacccacccccatgattcaattacttcccaccaggatcctcctgtgacacgtgggaattgtaagagttacaattcaagatgagatgtggatagggacacagccaaaccatatcacctggagaacattcagacaatagaaacagactcagaaatgaaaaagatgatagaactagtagataaggatgttaaaacagattctataaatacgtgcatatgttcaaaaatgcaaaataaacatgaacataatgagataaatggaagatataaatatggacacagtagaactcctagaggtgacatataaaacaccaggataaaacatttactgtataggactaatggcaggtcagagactgtagaaggaaatattaaacttagagacttggcaacagaatatatacaaaatgcatcaaagagaaaaagaacactgataaagtctcagtgacttgtggggctattaaagcacatggtatatacatatttggtgtctcagaaagagatgagacagactggggcagaaaaataacggctcaacagtttctaatttttttgaaagctataaatacagagaataaaaaatctcaatgatcttcaagaaagagacacataatacacacacaccccaaaccactccaaagcatacaacaatcaagttactgaaaactagaaaactgtttgactaaaaaaagatactttacatatatcggaacaactagaaaaagacattgcacacacataggaaaaagattagtatggatttcttataagaaattacttacagctaaaaacaatgggacagtgacttttaagaaccaataacaaaacagaacaaccccctgaaaaaaaaacaaaaacaaaaacaaaacaaaaaaccttgtctatccacaattttctatccagtgaaattatccctcagaaatgaatactaaggtgggggccaagatggccaactagaagcagcagtgatcagaggctcccatcgaaagaaccataatagcatgtgaatcctgcaccaccaaccaaggtatccaggatctctcaccagaactgactaggcagctggtgtgatccatggagaggaaggaagagcagtgtggtatgactgcacacccaagagccacatggagcaggggaaaccccactccccaagccaggggaggcagtgagagtgctacccagctgaggaaactgtgctttttccatggaactgtgcaatccatggattagaagatcccactcgcgatcccatgccactggggcctagggtcccaacctcagacctgtgcagattctctacagcctctcagctagaatttgcttaagcctgccaagttacaggggagaggggtgaccagcaccacagctgcagctgcctgctgtctacaccatttgagctccttggggaaggggcagcagccagcactgggactcataactgcttatcacactaagctccctgggcaggagaagggcggcatccatctctatagctccaggttgcacttttccactgctggagccaatgaggtgggacagcttggtcacaagaggtgtctcccacagcccaacacactggctgtggcagactggccagactgcctcttcaggcctgggtggggcccccatgcaggaactcttaacaactccagccagaggctccgggacaggaccctgatctccctgggcctgacccttttggggtaggggtggccgtagtatctgtcgaccagcagacttagcctttcctcctggtagttttgagtaattgcagcagcccagatgagtgggtttcccccagcgaagcacaccctctccaccaagggacaaagtgcttcattaaacaggtcctgttccctgtgccatgcaatgaggtgagaccctcaaaaaggggttgtcagacatcctatacaggagtgatactactggcatcaggttggtgccccttgaggtcagagatctcagaataaggagcaggaacttacctttgctgttctccagccttcttgagtgacatctgcaggcataggagtgaaccagaggaatatggcctgaagtgaaaccccagcaaactgcagcagccctacagaagagggacctgactattgaaagaaaaacaaacgaaaagcaacaacagcatcaacaacaaaaaaagtccccacaaaaaccccatccaagagtcagcagcctcaaagatcgaaactagacaaactcatggtgataagaaaaaaatcaacgaaaaaatgttgaaaacccaaaaggccaaagtgccccttcttcaaatgatcgcaacgcctctctagcaagggcacagaattggacagaggatgagatggaagaattgacagaagtaggcttcagaagatgagtaataaaaaaaacttctgctgagctaaaggatgatgatctaagccaatgcaaagaagctaagaacctttataaaaggttagaggagctaactagattaaccagtttaaagaggaacataaatgacgtgatgcagctgaaaaacacagcatgagaacttcgtgaagcatacacaagaatcaatagccaaatcgaccaagtggaagaaaggatatcagagtttgaagaccaccttgctaaagtaaggcatgcagacaagattagagaaaaaagaatgaaaaggagcacacaaagcctccaagaaatatgggactatgtaaaaagaccaaacctatgattggagtacctgaaggagacggggagaatggaaacaagctggaaaacacctcaggatattatccaggagaacttccccaacctagcaagacaggccaacatgcaaattcaggaaatacagagaacaccactaagatactccatgagaagatcaaccccaagacacataattgtcagatttaccaaggtgaaatgaaggaaaaaatgttaaggccagccagagaaaaaggtcacgtcacctacaaagggaagcccatcagactaacagcagacctttcagcagaaaccctacaagccagaagagattgtgagccaatatcaaacattcttaaagaaaagaatttccaacccagagtttcatagctggccaaactaagcctcataagtgaaggagaaataaaatcctttccagaaaagcaaatgctgagggattttgtcaccaccaggcctgccttgcaggagctcctgaaggagacactaaatatggaaaggaaaaactggtaccaaccactgcaaaaaacacaccaaaatataaataccaatgacactatgaagaaactgcatcaactagtgtgcaaaataagcagctagcatcatgatgacagtatcaaattcacacataacaaaactaaccttggccgggagcagtggctcatgcctgtaatcccagcactttgggaggccaaggcaggtggatcacctaaggtcaggagtgcgagaccagctgggccaacatggtgaaagccccgtctctactaaaaatacaaaaattagctgggtatggtggcaggcacctgtaatcccagctactcaggaggcttaggcaggagaatcgcttgaatccagggggcagaggttacagtcagccgagatcatgccattgcactccagcctggacaacaagagtgaaaccttgtccaaaaaaaaaaaaaaaaaaaaaaaaaccttaaatgcaaatgggctaaatgctccaattaaaagacaaagactggcaaattcgataaggagtcaagacccattgatcggtgtgctgtatttaggagacccatctcacatgcaaagacacacattggcacaaaataaaaggatggggggaaatttactaaccaaatggaaagcagaaaataaaaattaaaaataaaaaaaggaggggttgcaatcctagtctctgacaaaacagactttaaaccaacaaagatcagaaaagacaaagaaggcagtcccagccaccaaccccagacagtggaatccttgggctcctgagcttcaggatgattcatgctgagatggaccctgaagaagcactttgttggcaatcctactaatagtgactttgagttgaagacakctgagctcccacccttaaaaaatagagaggtcctgcttgaagctttgttcctcactggggacccttacatgagagtggcagmcaaaagactgaaggaaggtgatacaatgatggggcagcaagtggccagrtttgtggaaagtaaaaacgcagccttaccaacagaactattgtactggctccttcaggctggacagcacactccattgctsatggaaaagatctggaaaacctgccaacagaatggcctgacacagtaccactgtctctggctctggggacagttagcatgacaggcctcactgcctactttggcctacttgacatctgtggtgtgaagggtggagaaacagtgatggttaatgcagcagctggagctgtgggctctgttttggggcarattacaaagctcaagggctgcaaagtggttggagcagtagggtctgaygaaaagactgcctgccttaaaaagcttggatctgatgtctttaactacaagacagtagagtcttkgaagaaactttgaagaaagcctctcctgatggttacaaytgttattttggtaatgtaagtggatggttttcaaacactgttatctcccagatgaagaaatttggaagaattgccacatgtggagctatctctatatataacatatacatatctacatataacacctgtaatcccagtactttgggagaatgaggcaggtggatcacctgaggtcaggagtttgagaccagcctggccaacatggtgaaacccccgtctctaccaaaaatacaaaaattagccgggtgtggtggtaccagcccacttcccccaggcccaatcccagagattgttagatgtatcaggagcttcacatggaagggttcattgtgacctgctggccaggagatgcccaccaaaaagctctaaaggacttgctgaaatgggtctcagagggtcaaatccagtaccaggaatatatcattgaaggatatgaaaacatgccagctgcatttatgggaatgctgaaaggagataatttggaaaaacaatagtgaaagcgtgaaaaaaaatgacacatggaatctgaatgccatttaggtgattacttgtttttcaccatttagcaaaaatgtgtactacgttaaatgtctaagaaatagtactagtaacgggtttgacctacctaataaaatacatttaactggtatgtaattagtgatggaggatgaaaatttcagagccaacaacaaccagccacctcactgttcactacagcttcttctgagttgtggtagaaaataatggctttggagtttgaaagtttatcaaacactgcatgttctcactcataagtgaaagctgtacaatgagaaaacatggacacggggaagggaacaacacatactggggcctatggggggtgggaggaaggagagcatcagaataaatagctaatgctgtggggcttaatacctaggtaatgggttgataggtgcagcaaaccaccatggtgtacgtttacctatgaaacaaacctacacattctgcacatgcatcccagaacgtgaaataaaataaaaattaaaaaaaaaagaaagacaaagaagggcactacataatggtaaagggatcaattcaacaagaaaagctaactgtcctaaatatacatgaacccaatataggagcacccagattcataaaacaagttcttagagacctacaaagagacttagactctcacacaataatagtgggagactttaacactccactgtcgatattagacagatcaatgtgacagaaaattaacaaggatattcaggacttgaactcagctctggatcaagtgaacctaatagacgtctacagaactctccacctcaaatcaacagaatatacattcttctcagcaccacatagcacttactctaaaacagaccacataattagaattaaaacactccctcagcaaatggaaaagaactgaaatcataacaaaattatcttagaatatagtacaatctaattagaactcaggattaagaaattcactcaaaaccacaaaattacatgcaacttgaacaaccttctcctgaatgactcctggatatatgacgaaattaaggtagaaatccagaagttctttgaaaccgatgagaacaaagagacaatataccggaatctctagaacacagctacagcactgttaagagggagatttatagcactaaatgcccatatcagaaagctaaaaatctcaaattgacaacctaacttcatcattaaaagagctagagaaacaagagcaaattagttttaaaactaggagaatacaagaaataaataacatcagagcacaaatgaaggagatagaaacacgaaaaaccctccaaaaaaaatcaatgaatccaggagctgggttttttttttttttttttgaggtgatggatactttatttatcctaatgtgattactacaccttgcatgcctgtatcaaagtatctcacgtaccccatcaatatacatagctgctatgcacccacaaaattaaaaacttaaaaagaaaataagcacttttgtgtagcagacactatcagaaagtgaaaagacaacctattaaatgaaagaaaaaaaaattttttttttattatactttaagttttagggtacatgtgcacaatgtgcaggttagatacatatgtatacatgtgccatgctggtgcgctgcacccactaactcgtcatctagcattaggtatatctcctaaagctatccttcccccctcccccccaccccacaacagtccccagagtgtgatgttccccttcgtgtgtccatgtgttctcattgttcaattcccacctatgagtgagaatatgcagtgtttggttttttgttcttgcggtagtttactgagaatgatgatttctaatttcattcatgtccctacaaaggacatgaactcatcattttttatggctgcatagtattccatggtgtatatgtgccactttttcttaatccagtctatcattgttggacatttgggttggttccaagtctttgctattgtgaatagtgccacaataaacatacgtgtgcatgtgtctctatagcagcatgatttatagtcctttgggtatatacccagtaatgggatggctgggtcaaatggtatttctagttctagatacctgaggaatcgccacactgacttccacaatggttgaactagtttacagtcccaccaacagtgtaaaagtgttcctatttctccacatcctctccagcacctgttgtttcctgactttttaatgattgccattctaactggcgtgagatggtatctcattgtggttttgatttgcatttctctgatggccagtgatggtgagcattttttcatgtgttttttggctgcataaacgtcttcttttgagaagtgtctgttcatgtcctttgcccactttttaatggggtttttttcttgtaaatttgtttgagttcattgtagattctggatattagccctttgtcagatgagtaggttgtgaaaattttctcccattttgtaggttgcctgttcactctgatggtagtttctttagctgtgcagaagctctttagtttaattagatcccatttgtcaattttggcttttgttgccatggcttttggtgttttagacatgaagtccttgcccatgcctatgtcctgaatggtaaagcctaggttttcttctagggtttttatggtgttaggtctaaagtttaagtctttaattcatcttgaattgatttttgtataaggtgtaaggaagggatccagtttcagctttctacatatggctagccagttttcccagcaccatttattaaataggaaatcctttccccattgcttgtttttctcaggtttgtcaaagatcagatagttgtagatatgcggcattatttctgagggctctgttctgttccattggtctatatctctgttttggtaccagtaccatgctgttttggttactgtagccttgtagaatagtttgaagtcaggtagtgtgatgcctccagctttgttcttttggcttaggattgacttggcgatgcgggctcttttttggttccatatgaactttaaagtagttttttccaattctgtgaagaaagtcattggtagcttgatggggatggcattgaatctgtaaattaccttgggcagtatggccattttcacgatattgattcttcctacccatgagcatggaatgttcttccatttctttgtatcctcttttatttcactgagcagtggtttgtagttcttcttgaagaggtccttcacatcccttgtaagttggattcctaggtattttattctctttgaagcaattgtgaatgggagttcactcatgatttggctctctgtttgttattggtgtataagaatgcttgtgatttttgtacattgattttgtatcctgagactttgctgaagttgcttatcagcttaaggagattttgggctgagacaatggggttttcgagatatacaatcatgtcatgtgcaaacagggacaatttgacttcctcttttcctaattgaataccctttatttccttctcctgcctaattgccctggccagaacttccaacactatgttgaataggagtggtgagagagggcatccctgtcttgtgccagttttcaaagggaatgtttccggtttttgcccattcagtatgatattggctgtgggtttgtcatagatagctcttattattttgaaatatgtcccatcaatacctaatttattgagagtttttagcatgaagggttgttgaattttgtcaaaggccttttctgcatctattgagataatcatgtggtttttgtctttggttctgtttatatgctggattacatttattgatttgagtatattgaaccagccttgaatcccagggatgaatcccacttgatcatggtggataagctttttgatgtgctgctggattcagtttgccagtattttattgaggatttttgcatcaatgtttatcaaggatattggtctaaaattctcttttttggttgtgtctctgcccggctttggtatcaggatgatgctggcctcataaaatgagttagggaggattccctctttttctattgattggaatagtttcagaaggaatggtaccagttcctccttgtacctctggtagaattcggctgtgaatccatctggtcctggactctttttggttggtaagctattgattattgccacaatttcagagtgtgttattggtccattcagagattcaacttcttcctggtttagtcttgggagagtgtatgtgtcgaggaatttatccatttcttctagattttctagtttatttgcgtagaggtgtttgtagtattctctaataatagtttgtatttctgtgggatcggtgttgatatcccctttatcattttttattgcatctatttgattcttctctctttttttctttattagtcttgctagcagtttatcaattttgttgatcctttcaaaaaaccagctcctggattcactaattttttgaaggggtttttgtgtctctacttcctgcagttctgctctgattttagttatttcttgccttctgctagcttttgaatgtgtttgctcttgcttttctagttcttttaattgtgatgttaggtgtcaattttggatctttcctgctttctcttgtgggcatttagtgctataagtttccctctacacactgctttgaatgcatcccagagattctggtatgttgtgtcttagttctcgttggtttcaaagaacatctttatttctgccttcatttcgttatgtacccagtagtccttcaggagcaggttgttcagtttccatgtagttgagcggttttgagtgagattcttaatgctgagttctagtttgattgcactgtggtctgagagacagtttgttataatttctgttcttttacatttgctgaggagagctttacttcctactatgtggtcaattttggaataggtgtggtgtggtgctaaaaaaatgtatattctgttgatttggggtggagagttctgtagatgtctattaggtctgcttggtgcagagctgagttcaattcctgggtatccttgctgactttctgtctcgttgatctgtctaatgttgacagtggggtgttaaagtctcccattattaatgtgtgggagtctaagtgtctttgtaggtcactcagaacttgctttatgaatctggatgctcctgtattgggtgcatatatatttaggatagttagctcttcttgttgaattgatccctttaccattatgtaatggccttctttgtctcttttgatctttgttggtttaaagtctgttttatcagagactaggattgcaacccctgcctttttttgttttccatttgcttggtagatcttcctccatccttttattttgagcctgtgtgtgtctctgcacgtgagatgggtttcctgaatacagcacactgaagggtcttgactctttatccaatttgccagtctgtgtcttttaattggagcatttagtccatttacatttaaagttaatattgttatgtgtgaatttgatcctgtcattatgatgttagctggttattttgctcgttagttgatgcagtttcttcctagtctcgatggtctttacattttggcatgattttgcagtggctggtaccggttgttcctttccatgtttagcgcttccttcaggagctctttttgggcaggcccggtggtgacaaaatctctcagcatttgtttgtctgtaaagtattttatttctccttcacttatgaagcttagtttggctggatatgaaattctgggttgaaaattcttttctttaagaatgttgaatattggcccccactctcttctggcttgtagagtttctgccgagagatccgctgttagtctgatgggcttccctttgagggtaacccaacctttctctc

SEQ ID NO: 94015 - DNA, 12668 bp, Homo sapiens
aatattttaaatttcttgtagagatgaggtctgcctatgtttgcccaggctggtcttgaacttctgagctcaagtgatcttcccactttggccttccaaagtgctaggattacaggtgtgagccaccatccccagcccctccttgttttaaagtagtacctgccctctccctttcattggaaacagagtagagggcatcaaggatagaaaaactgcttaccaatgaggaaacctaagtcgagagacatttcaagggcattaaacccattactcctaactcaaaattgtgataagaagacataaagaagaaattgggggcattatgatgagaggaaaatgtagcctagatgatcaaggaagttttttttttgagtaaatgatgtttaaggttcatttttaaaattctgagggagggagtggggaggtgctggtggctgtaatagggtagactgagagatgctggtgctggattcctgccttgtagcttgaccatgatggtgttcacatgaatctatttgtatgataaaattacataaaactaaatccacacacccccacacacccagcacttgtaaagttgttggaacctgaatgtcatgaattgcatacgtaccaatttgcagttgtgacactgtgctgtagctacgcaaggtgttatcactgggaggagctggggaaagtgtgcaagagaactctccatgtttcttcttgtgaccacgggtgaatctagcatcacctcaaaactaaaagtttgtttaaaaagaaaacaatgggcctggcgcagtggctcaagcctgtaatctcagcactttgggaggctgaggcgggcggatcacctggagtcaggagttagagaccagcctggccaacatggcaaaaccctgtctctactaaaaatacaaaaattagctagatgtagtggtgcatgcctgtaatcccagctacttgggaggctgaggcaggagaatcgcttgaacccgggaggatgagattgcagtgagctgagatcgcgccactgcactccagcctgggagacagagcgagactccatctcagaaaaaaaataaataaataaaggaaagaaagaaaacaatgatcaagtgttagccatgtgaagaatgttcccagtgaaggcctggagggggaagggctcgacaagctgaaggagggaaaagagcgtggccagagcacaggagcaagggggactatgccagcgaggaggctttggtggaaggaaaaagaaagtcaaaggctttagggctctcccagctcttttagattttgtcttaagtgcaagggaagggttggaagtaggacagtgatgtgatcagatctatcttttaaaaccatctctgaccatgtggagaatggctgggaagtggaatgaagcaagaggagaggcttctgcagaggtgagcaggcatactgaccagactatgatggttgcaagtgatttggaaagatacgggcaatatttagaggtattttgcagatagaatgtgcacaatgtagtaatgaaatgtctaataaacggtgaagaaacggggtgtgtcaaagatgctgtatgtttctgaaatgaacaattgggttgatggaggtactttattttcgaagaaaaggggtatgtcaaagatgccgtaattgggtggatggaggtgctttattgtctcaagtggggaagaacggaggagaagcatatttgcatggacatcaagatgggtttactcatgtcccattgccacactgtcctaaatccatagtttttaaatatatttgatatttatgggacagattctcctatcctcatttttctttttcagacttcagctggcttttcacacctgtttgtttttccatatgactacactcggccttatctagttcaagaaaaaattcattttggtgtttttactcagatcacagtaaatatgtaaattaacttaggataattgacatttttatgaggttgacttcctcttcaagaaccaatcttaccttccctaggctcaagtcttctttgaggggccctcaatggtatttttacattttctataatgcttgtacatttcctattaagcttatttctagtaagctcatcttttattgctactgtaaatgtggtcttcccttccatcgtatattctaagtggatattgtttgtacatttgaaaactgttgatttatttaataaattaaatttatttaattaaatttattaaattaaatttatttttaattaaatttatttaattaaatttatttaattaaatttatttaattaaatttatttaattaaatttatttaattaaattcatttttaattaaatttatttaattaaattcattttcaattaaatttatttaattaaattcattttcaattaaatttatttaattaaattcatttttaattaaatttatttaattaaattcattttcaattaaatttatttaattaaattcatttttaattaaatttatttaattaaattcatttttaattaaatttattatttaattaaattacatttatttaatttaagtagacggggtcttgatatgttgcccaggctggcctggtactcctgggctcaagggaccctcctgccccagcatccccagaaggagggactatagttgtgtgccaccaggcctgctgatttatttttgcagtttggtactgaccttactcatttatgtggttgaactaatttttagatgattttttgaggtttcctagatatacaataatatttgcaaataataatgattttgccttctccttttctcatttttatgcttcttttttcccctgctagtctctcggccttgcttagtgcctccaaacatctttaaatcgaaatgatggtaatggacatttttgtcttgttcctgacttaaatgggactttcttggggaggggatttcataaacattgtggtaaactgggtgaggtagatacagtttttaatcattctaaaggattgccttgtaattattcatctattcagaatagttatcaagaatggatgcttatcaaatggattgtctttgaagataatcatactatttttctttcttgggaattgctttaatagcaaatttctttactgacctcttcttgtattctcaaaataaactccacttggttaaaagattacccttctgacctttgctggattctgtttgttaatgttttatttaggatttttgcatgaattatttctaagtaaatttgttctgtagttttcttttttgggctaccactgttaggattgatttgctagctttgtatgaaaagtttaaaagattttttttccttttctatgcactggaacatttgaaagtgcattgtagccatctgttcctgagaagtttggtacaattccccagtgaaaacttggagcctgattcttttgggggctagagtaaaaggtcagtgatagttaggaagctgctcttggacaaattcctctatttcttctatggtaattgatccatttagatttttttctctcctaaagtcagttttgtaaatttttattttcctggaaaataattttctccatctaggaattgagattaatttatatacaaataagaaaagtcatctctatttaaggtaatcccactatatggtacctgtaatacacaaaagcagtatagcgcagtttaaaggtgaatttagataagttaaaaatggatattacaaactcgagagcaaccacctttattacagagtgtttttcattgtcgtgaaaaatcttctgggtacatctgacaatgtttgttcttcttctactcctcgaactcctgacctcaggtgattcacccacctcggcctcccaaagtgctgggattacaggcgtgagccaccatgcctggcctcctcttctactcctgccagagacatgaagggatctttcttggctcttcaccatgagaacctggtggggtttctggaggtgaaacccatgaaaacataggtccccacctcaagactgcaggccttgggagtttgtcactttcatgctagttcactgcagcaatttgccaaaatcatcatggacatgtttctaagagttgatgccctcattggcttctgctccaggtgagcaggtgtccttgtgactctctggacttgcccatctctccagatttgggggtggcagtttgctctgcaaacttagttctctgatgtgtccaagaaaggtcatgaattgacggcttgtttagctttttcttgttctaagaatgggagtaatgacttccaagcccttcacttgtcagagctgaaattatgagttaattatcttgtatgtaatatcttatttttctcacagttttcaagattttctctatcattggcattctgtggtgtgaatgaatgttctgtaccagggtgtgattttctttgaaggtctccaatgtggggtttttggggctttacaagatatactcatatttaccagatatcgggagtgttctgtctttttttcataaataaagaaatatgaagactattctctctctctctgtgtctctctctctctctcccctcctcctcctcctcctccttcagttaagccttatgttggactgcttgatattgttctataagcctctgagggtctgcttatttttcttcacttgtttttctttctgttcttcaggttggataatttctacttatcttcttccaagtttactgattctttattctgccatctcccatctgctgttgagcctatcaagtaaaattttttttgcttgcagttgtacttttcagctctggagtttttatttgtttcttttttataattttaatttctgtattgagattttctatttgttcactcatcaacaccatgcttcttttaattctctgagtgtgattatagtagctgctttaaaattgttatcagctaaacctaacatctgagttcactttcaataaagattccataagcrtccttctatcctgaatatgaaccaccctttcttgtttctttgcacgtctggcaattttttggttcaaaacctgatattgtaggtgacatgttgtaatgactctgtaatgtgttatattcttctgaagattattgaacttttttctattaagccattaacttgcttgcctaaattctaattgtaaacactgtctcccttgtagagtgcatcagctgacatctctgaccagctttcttttctcttccagctgctgcatttatagccttgtctctgaaggtgttttccatctgtgcggttaaacagtcagtcaaaagtttgagaggagtttacactgaaatattgggacttattctctctgagatttccttgcttacagctgatctccagccccagttctgttttctggcaccgcaggccattgtggcttcagctttacgcctccgttgggaatgcacagttaaaagagcaacacatttgcatatctcacctgaggcaggcgttcaagaacacgttcctctctcacctctgcctgctagttctttgagtctcttgggctctgtcttacatatgcatagttcagcagtcagtcaaaggtttgggcagaatttatactcatattttgggattcacttcttttggaactctcctgatttcaggatttcactcctaaatctcctcctgttttgccaaccctaccctctgttttctgacactttaactagaaaggctgtgattttctgcagcaggatttggggttggggatggaaaacatttgcagggaaaatatagcataaacttgcaattcttactcctataatcattctcaagagtaaattatcctgcagtttctatccatttgggtcattctccaatgccttcagatggcttaaaatttttttttgcagtttttatttaaaaagtttttgttggaggtttgctgaaaaacttcatgccacttgtattagaccattcttgtgctgctataaagaaatacttggctttgcagatgctgctgtggccaggagccccataataccagccatggtcaaccccaccattttcttcgacatcaccatgatagcgagcccttgggctgcgtctgttttgatytgtttgcagagtagtttccaaagacagcagaaaacttttgtgctctgagcacatgagagaaaagatatggttttaaggattcctgctttcacagaattattccagggcttatgtggcagggtggtgacttcacatgccataatgacactggtggcgagcccatctgtggagagaaatttcatgacgagaacttcatcctgaagcctacaggtcctggcatctttttcacggcaaatgctggacccaacacaaacggttcccagtttttcatctgcactgccaagactgagtggctggatggcaagcatgtggtctctggcaaggtgaaagaagaaactgaatattgtggaggccatggagcgctttgggtccaggaaaggcaagaccagcaaggaggtcactattgctgactgtggacaacgctaataagtttgacttgtgttttatcttaaccaccagaccattccttctgtagctcaggagagcaccccccaccccatttgctcacagtattctatcatctttgtgttctcactgcagttccctttgggttctatgggtttccttccatgcctagctggattgcaaagttcagtttatgattatgaaataagaactaaatgacaataataataataaaaagaaatacctgagaccgggtaatgtataaagaaaagaggtttaattggctcacaggtctgtaggttacacaagcatggctccagcacctgccttggtgagggcctcaggaagcttccaatcatggtggaaggaaaagagagagcaggcagtcacatggcaagagcaggagcaagagaggggagaggaggcatcatgctgttctaaacaagcagatctcagagcaagaactcattcattatcacaaggacagcaccaagcctgagagactcaccccatggccccagcaccttccaccaggacctaccttcaactctgggattacatttcaacatgggatttggaggaaacacacatccaaaccacatcatcactgctatcagcagaagtcccagagaggtttttgttttgttctgtttgctacttgctttcatttaactttcccccctttcttttcttatagtgaaaaagaaaaaaaaatataagtcccagggaggggttttccattttgaatacccatctttgaataaagtgagtccttcctggactcatcacttgcaggaggaaactctctcatctggtacagtcagaataattcttctcatcctgcaagattgtgtatgtgaatgatttctttaatgattacttttccttcaacaactgagatcgttactgagggtgattcacaatgcagtctttctcctccatcctgccacattgacaaaatgctccctaaagatgcaggttgtctgtataatggcttattcagcttctacttcctctactttgctttggaatcaaactgagtccacaggattttttttttttcccttaccatcagtctacatccactgtttcactttggcctttgcaggtttcctcttaaaaatctgcatcttctgcatctgcttgcacttcaacttgaccttcattgttagaccgcccttcctactatcgtgtgatttggggtttctactgtttcctagttttgtcaaggatggtgttagcatgtctgtttctcgttttcttcgttatttttgtttggcttctgagaggagcaggaggaaatactgaactggctatactatataaagccagaaataatcgctagggtttttcttttaatcaaaaaaatattatttttttgagtcaagttctcactgtcacccagattggagttcagtggcacaatcatggctcacttcaactttgaactcctgggctcaagcaatcctaacaccttggactttcaaagtcctggagagaaacacctgagccatcatgcccaactgaatataattttttattttgagataattgcagattcacataagttgtaaaaaatgatacagagggattccatgaaactttacttagtttcctcaatgataacattttgcaaaactacaacacaatatcacaactgagatgttggaattgatacagtcaagatatagaaggtttccattaccaccgggatcttcctgttgtccttttatagccacacccacttgccttccaccatcacccactccttagtgcctggtagccactcactggctgttctccatttctataatttctatactttcaagaatacagcactttgggaggccgaggtgggtggatcacttgaggccaggagttcaagaccagcctggccaacatagggaaaccctatctctactaaaaaaaaaaaaaaagaaagaaaaaaaaattagctgggtatggtggtgtgcacctgtaatcccatctacttgggaggctgaggcaccagaattgcttgaacccgggaggtggaggttgcagtgagccgagatcatgccactacacttcagcctgggtaacaaagcactactctgtcaaaaaaaaaaaaattatataaatcacacacttttttcactcggcataattccctggagcttcatccaggttgttgcctgaatgaaagtttatatcattttactgttaagtagtgttccacggtatggctgtaccatggtttgtttaaccatattcccactgaagaacatttggattatttccaatattaggatataatgaagaaaatttctataaacattcatgtacaggtttctatgtgaacacagcttttcatttctgtaaggtaaaggccaaggaatacatggtagtggcaggtttaatattttttaaaactgtcaaaatgtttttcaaagtgaccttatcactttacaattccatcagcaatttaaattgtggtaagggaaaccttctagatcttgatccagtttttcttaattctcctcagcattcaataataatttgaaaaattttaaaacacaccgattagaatgactaagataaaaaataacaacaactatatttatatataagagtggtaaaaatggacatccttgctttgttcctgatctttttgggagaaccttcagtctcttaccatgaggtatactgttaagtatagggatttttgtagatgttctttatcaagttaagttacccttgtatagaaaccttacctacctttacctctctttatttgccacatttaaaaataaaaacaactattttttattttagtcattctaataggtgtgttttaaaatttgcatttctctaatggctaatgatgttgaacatcttttcttttttctttttctttttttcattcttctttttttttttttttttttttgagatggagacttgccctgtcacccagtctggagtgcagtggcgcaatctctcatctcactgcaacctctgcctcctgggttcaagcaattctcctgcctcagcctcccgggttcaagcaattctcctgcctcagcctcccgagtagctgggattacaggcacctgccaccacgcctggctaatttttgtattattagtagagacggggtttcaccatgttggccaggctggtcttgaactcctgacctgaagtgatctgcttgcttcagcctcccaaagtgctgggattacaagcgtgagccaccacacccggccaaacatcttttcaagtgcttatttgccatctgtattttgtcttcggtgaaatatttcttcatgacttttgcacactggattgtttgaattttattgttgagtttggagagtttttgttttgttttgttttgtttttttggcaaggtcttgctctgttgcccaggctggagggcagtgtggtgccatcattgctctctgcagcttcaaactcctgagctcaagccatcctcccgccttggtccccagagtgttctttacatgtgctacatactagttcttttcagatatgtggtctgcaaatattttcccatagttagtaggctgtcttttcatcctcctaaatgtctttcttagaacaaaagtctttcatttagataaagtccattttatcagttttaaattttatgtatcatgctttgttgtcaagtctaagaactctgcctagctctaagattttctcctatttcttttaatcttaagattttacagatttccatttgacatttaagtctgtaatctattttgagttaattttgtataaggtatgaaatttagattgaggtggtctttgttttttgttttttaatctacggatgttcaattattcaagcaccatttgttgaaaaagtgatctttcccccattgaattgctttgtcaaaaattatttgggtaaatttgtgtggatctatttctgggttctctgcctgttctgttgatctatgtgtctctgcctctgccaataccatgcagtcatgattacggtggctgtactgtaagtcatgaaaatgggtagactgattcctcagatcttttcaagatcgttttagttattctagtccctttgcctctccatataaagtgtagaataatcttgcctatatctacaaaaatattgctgggattttgataggagttgtattaaatcagcatatcattttgggagaattgacacctttacaaagttgcatcttccaattatgaacgtgatatgcctcatcatttatttagattctcttctatttttttcactggtgtttggtagttttcagcacacaggcgctataaatattttgttagattcacagctaaatatttcattttattttgagtgattgtaaatagtattatattttttaattttgatgcccatgtgttaattgctagcatatagaaaaacatttgacttttgtatttttacttgtatcttgtgactttgccgaaatcacgtattagtgataggagattttttgtagattccttcatatttttcatacaggcaatcctgtcatctgcaagtaaggacaattttatttcttcctttccagtccatatatttttatttctttttctagccttattccactggctggaactttcagtgttacattgaataggagtggtgagagtggacatcattgcttcgtccctagtctttttgggaaaaccttcagtcttttgccattaagtatagttataggatattttggtagatgttctttatcaagttgagtaagttgcctgtgaagtatagaaactttacctgaatttacatccctgtgtatgccgtatttataactgttttaattatttgctatacatacatttagaaccacatcaaagagtgttataatttttgcttcaactgtcaaacataatatagaaaatcaaaagaagaaggaaagtatatcatatttactggtatttttgcttactatatcctgtcttccttcttgatgtccccagattccttttttttttaa[450 bp omitted]gcctcaacatttttcccctcttcttctgggattccaatgtcatgaatgttagatcttttgttaggatcctgcaggtccttgaggctctgttccctttttccagtggtttagatttcataatttctatgtttctgtcttcctgttcactgatcctctcctctgttccctctgttctgctagtgtgaccatccactgtgtttttttacattatatagtggttattgcatttttcacttctaaaatttccatttagtccttctttgtatcttctattcctttgctaaaacattctattctttgaagagtctatttttcatttgtttcaagcctgtttgtaattgctcactgaagcatgtttatgatggttgctttagaaaatctttgtttggttcagtgcagtggctccagcctgtaaccccagcactttgggaggctgaggcaagatgatcacttgaggtcaggaatctgagagcagcctgatcaatatagtgagaccctgtctctgtttataaaaataaataaataaataacataaaatgtttaaaatattttttccagataattctaacatctctgtcaccttggtgctggcatccattgatgaccttttgtgatttgacttgaggtcttcctattttggatatgctgtgtgatttcctattaaaacctggacatttttgtattatattataagattctgaataagatttatgtagtaaatattg

SEQ ID NO: 94016 - DNA, 17601 bp, Homo sapiens
  misc_feature (1)...(17601): n = A,T,C or G
ttgtatctttagtagagacagggtttctccatgttggtcagcctggtttcgaactcacaacctcaagtgatccgcccgcctcggcctccctaagtgctgggattacaggcgtgagccaccatgcccagcccctaaattttgtatttttactagagacggggtttcaccatattgttcagggtggtctcaaactcctgacctcaggtaactcacctgtcttggcctcccaaagtgctgggaatacaggcgtgagccaccacgtccagccaaaggtgaggattccttaagcagagaacatcaagctgggctcagatttcttgacaacaagttaccactgaatgtcagagggcaatgaagcacaagggtcaagaaaataaattattacctcaaaactatgtatattctacttttgggggtggaggggcgggggatggagtctcgctctgtcgcccaggctggagtgcagtggcactatctcggctcactgcagactctgcctcctgggttcaagtgattcccctgcctcagcctcccaagtagctgggattacagatgcccactaccacgcccggctaatttttgtatttttcgtagagacggggtttcaccatgttggcaaggctggtctcaaactcctgacctcgggtgatccacccggctccgcctcccacagtgcctggattgcaggcgtgagccaccgcgcctggcccatagtatattctactttaaaggcaaaaggcaggcattctcaaacacaaaagaatccagggaatacggcatttctgagtcctttctgaaaacaacttacaacaaaatctcatcatctaggagttgaaataaggaactcttcccagctaattgagaggctgaggcaggagaatcacttgagcccgggaggttgaggctgcagtgatctgaaatcacaccgctgcactccagcctgggtgacgaagaccctgtctcaaaaaaagaaaataaggaactcaacaatgaaaatgacatggtcaaggaactaaacaggaggcaactgatccagttacagaatgaatatgacatgactatgggaaacaggtctacaatatcccattgtcatttgtccatgtatatggacatgtagaagtctgttgtaatgtttgcctagtattaatgattttttttttttttttgagacagagtctcactctgttgcccaggttgcagcacagtggcataatcttggctcactgcaatctccgtccctgggctcaggtgatcctcctgcctcagccacccgaatagctgggactacagatgcacaccaccagcccggctaatttttgtatttttctaagagacagggttttgccatgttggccaggatggtctcgaactcctgggctcaagagatccgcccgcctcaacctccaaaagtgctggaattacaggcgtgagccactgtgcctggccaatattaatgattgtttattggtggtggcattcaggtgatttttctcattttatttttctagtgtttaaattttgtataatgaatgtgtaccattttttacaaaaaatcttaacgatgaaccttcattaaaaagtctaaaaacaaaaatgctaatatactaacagcagttaattctgggtgatagaaatacacaggattgctattctttgtacttttctgtattttttatatttcttaaactaaaaacaaattcagaaaaaaacaataaacacannnnnnnnnnnnnnnnnnnnnnnnnnnnnnnnnnnnnnnnnnnnnnnnnnnnnnnnnnnnnnnnnnnnnnnnnnnnnnnnnnnnnnnnnnnnnnnnnnnnnnnnnnnnnnnnnnnnnnnnnnnnnnnnnnnnntccatctcaaaaaaaaaccttatggatacttttttgtattgtctaggtttattacaacgagcatgtattacttttatgaagatattctttctcttcaaaaaatgatgtcttctaagaagagcagatggaaataggccgggcacggtggctcacatctgtaatcccagcatgttgggaggccaaggcttgcagatctcttgagggtcaggagttcaagacaaaattagccacgtgtggtggcgcatgcttgaaattccaactgcttgggaggctgaggcgggaggatcacttgagcccaggaggaggaggttgcagtgagctgagatcacaccactgcactccagcctgggaaacagagcgagactctgtctcaaaaagaaaaaaaaaaaaaaaaagaacttttcagatcagacggtataacattattaacaaaagagagagaccaggcgcagtggctcacacctgcaatcccagcagtttgcgaggcctaggtgggagaatcacttgaggccaggagctcaagatcagccagggcaacatggcaagacaccatctctacagaaaaatttaaaaattaaaaaattagccaagcacggtggcacaagcctgtagacccagctacttgggaggctgagatgggaggatcgcttgagccaggaggtcaaggctgcagtgagccatgttcacaccactgcactccaccctggacaaaacagcaagaccctatttcaaaaacaaaacaaaacaaaaaaaaacaaaacaatcagagagacaaagagaacagggtaggaaaagcacaaaatatgctctacagatgtagtttggtaggggtcgagggttgagtaagggaagtagctaaggattagggaggagagatggactgcaggtactaaatgccaggctgaggacttgacagcttgggggaagaaacaaccaagaaatacaggggaaaggagtccctgtactttctggtctttctgaatactaagattttttggacagtgttttatttcacatcttcactcttttcccccatctgcaaaaacttacatgagtaaaagtcaccaaataattagagaagacaagacactgaagaaaaagttgtctttaatagaatccacagctaacattctatttacgtttttttaatagagatgttttatttttttattttgcttttttttttttttgagacagagtctcactctgtcacccaggctggagtgcagtgacgcgatctcagctcactgcaacctccacctcctgggttcaagtgattctcctgcctcagcctcccaagcagctgggactgcaggcgtgtgccaccacacccagctattttttgtatttttagtagagacagggnnnnnnnnnnnnnnnnnnnnnnnnnnnnnnnnnnnnnnnnnnnnnnnnnnnnnnnnnnnnnnnnnnnnnnnnnnnnnnnnnnnnnnnnnnnnnnnnnnnnnnnnnnnnnnnnnnnnnnnnnnnnnnnnnnnnnnnnnnnnnnnnnnnnnnnnnnnnnnnnnnnnnnnnnnnnnnnnnnnnnnnnnnnnnnnnnnnnnnnnnnnnnnnnnnnnnnnnnnnnnnnnnnnnnnnnnnnnnnnnnnnnnnnnnnnnnnnnnnnnnnnnnnnnnnnnnnnnnnnnnnnnnnnnnnnnnnnnnnnnnnnnnnnnnnnnnnnnnnnnnnnnnnnnnnnnnnnnnnnnnnnnnnnnnnnnnnnnnnnnnnnnnnnnnnnnnnnnnnnnnnnnnnnnnnnnnnnnnnnnnnnnnnnnnnnnnnnnnnnnnnnnnnnnnnnnnnnnnnnnnnnnnnnnnnnnnnnnnnnnnnnnnnnnnnnnnnnnnnnnnnnnnnnnnnnnnnnnnnnnnnnnnnnnnnnnnnnnnnnnnnnnnnnnnnnnnnnnnnnnnnnnnnnnnnnnnnnnnnnnnnnnnnnnnnnnnnnnnnnnnnnnnnnnnnnnnnnnnnnnnnnnnnnnnnnnnnnnnnnnnnnnnnnnnnnnnnnnnnnnnnnnnnnnnnnnnnnnnnnnnnnnnnnnnnnnnnnnnnnnnnnnnnnnnnnnnnnnnnnnnnnnnnnnnnnnnnnnnnnnnnnnnnnnnnnnnnnnnnnnnnnnnnnnnnnnnnnnnnnnnnnnnnnnnnnnnnnnnnnnnnnnnnnnnnnnnnnnnnnnnnnnnnnnnnnnnnnnnnnnnnnnnnnnnnnnnnnnnnnnnnnnnnnnnnnnnnnnnnnnnnnnnnnnnnnnnnnnnnnnnnnnnnnnnnnnnnnnnnnnnnnnnnnnnnnnnnnnnnnnnnnnnnnnnnnnnnnnnnnnnnnnnnnnnnnnnnnnnnnnnnnnnnnnnnnnnnnnnnnnnnnnnnnnnnnnnnnnnnnnnnnnnnnnnnnnnnnnnnnnnnnnnnnnnnnnnnnnnnnnnnnnnnnnnnnnnnnnnnnnnnnnnnnnnnnnnnnnnnnnnnnnnnnnnnnnnnnnnnnnnnnnnnnggtatctttctctgtgttcattctacccaagggaaaaaatcctgtatgaaatttgtatcactttttctgtgagttaccaagagaataaaaataaacaaagaaatttgtatcacattataatcaaaattcctgttttccatatttgccaagcaaatatggggtgtgtgtgtgtgtgtaaagttagtgatcttacaaacctagctgagtaccctctgctctggcccgtgagcctgacatttttttcagtgtgtgtgtgtgtgtgttgtgtggtgtgtgtgtgtgttgtgtggtgtgtgtgtgtgtgtgtaaagttagtgatctcacaaacctagctgagtaccctctgctctggcccgtgagcctgacatttttttcagtgtgtgtgtgtgtgtgtgtgtgttgtgtggtgtgtgtgtggtgtgtgtgtgtgtgtgtgtgtgtgtaaagttagtgatcttacaaacctgagtaccctctgctctggcccgtgagcctgacattttttttcagtgtgtgtgtgtgtgtgtgtgtgtgtgttgtgtgtgtgtgtgtaaagttagtgatcttacaaacctagctgagtaccctctgctctggcccgtgagcctgacattttttttcagtgtgtgtgtgtgttgtgtgtgtgtgtgtgtgtaaagttagtgatcttacaaacctagctgagtaccctctgctctggcccgtgagcctgatatttttttcagtgtgtgtgtgtgtgtgtgtgtgtgtgtgtgtaaagttagtgatctcacaaacctagctgagtaccctctgctctggcccgtgagcctgatatttttttcagtgtgtgtgtgtgtgtgtgtgtgtgtgtgtaaagttagtgatctcacaaacctagctgagtaccctctgctctggcccgtgagccttaatcctagcgagggctcgctgcggtggtctaagggcctccagatcccacccgggtaggacttcgcacagatgcagctcccgcgccgggagtgagcccatcctggcacccgtgtgcacagtcaccctcgaatcacggctgaacggcatccgacgcgagtggcttcctgcctctattctacccatctccttactcaggacgccatcgcgggtttcccagggccaaccattcccgccgcgccaccctaagacgcgcccggcgcccaaacactgaggaagcgggtggggtcccctgcggcccctgcagcgggaggggcgcccggacgtcacagcagggccgcccgcccgcctcgcggcctcccgcctcccgccccgcggaccccgcgcgtcccccgcgctccttccgtggcccaggtcccaggcgagctccgcccctcagaccagcgcgctcgaggtcgccccgccacagcccgtcctctacccgcctctgctggaaaacaggccgcagaatataggtgttctcgggctcccctgcgttcttctcagcctcaggcaccccgtcgcccaccgagaaggacactccgatggacgtggccatgccggggcttctcggtccgggcgtagctcgcgatgaaggcctagcgggttgcggtcgcggccggcagcagggaaagcgtctccagggcaacagggccgccctcccgcctcgctgaagcccgcgagcgccccgcacagccgccctccctgcccgcgcctgcgcaccggctgctgggcgggaactggtcgcgtccggacgcgcgacagcttccacccgcctcaggcagtatcagccgcgccgcagtcggaggaaatagacgcggggcctgaggctcctggacttgaggtattaggctggtgcagaagtaattgcggcggccgggtgcgggggctcaggcctgcaatcccagcactttgggaggccgaggcgggcggatcacctgagtcaggaagagttcaagaccatcctggccgacatggtgaaaccccatctctactgaaaatacaaaaattagccgggcgtggtggcgcgtgcctgtaaccccagctgctctggaggctgaggcagaataatcgattgaaccaaggaggccgagcttgcagtgagccgagatcacaccactgcactccagcatgagactctgtatcaaaaaaaaaaaaaaaaaaaaaaattctgcgtgagttgtgtggaggtgtcagtacctttccccagcaagagaagcttctccatatcaggcatatcctagccatgaccctgaaactaaccagccaagagggaaatgtgagacaagcccaggcaagcttcctggatgttgtatgcagggataggatgtgctctctggacttgggggcttcctgcctgctcaagaggctgtgcctccttgtgtctcccgcaggcctctgtgtccgccttccccaccctggcaggcctgggtnnnnnnnnnnnnnnnnnnnnnnnnnnnnnnnnnnnnnnnnnnnnnnnnnnnnnnnnnnnnnnnnnnnnnnnnnnnnnnnnnnnnnnnnnnnnnnnnnnnnnnnnnnnnnnnnnnnnnnnnnnnnnnnnnnnnnnnnnnnnnnnnnnnnnnnnnnnnnnnnnnnnnnnnnnnnnnnnnnnnnnnnnnnnnnnnnnnnnnnnnnnnnnnnnnnnnnnnnnnnnnnnnnnnnnnnnnnnnnnnnnnnnnnnnnnnnnnnnnnnnnnnnnnnnnnnnnnnnnnnnnnnnnnnnnnnnnnnnnnnnnnnnnnnnnnnnnnnnnnnnnnnnnnnnnnnnnnnnnnnnnnnnnnnnnnnnnnnnnnnnnnnnnnnnnnnnnnnnnnnnnnnnnnnnnnnnnnnnnnnnnnnnnnnnnnnnnnnnnnnnnnnnnnnnnnnnnnnnnnnnnnnnnnnnnnnnnnnnnnnnnnnnnnnnnnnnnnnnnnnnnnnnnnnnnnnnnnnnnnnnnnnnnnnnnnnnnnnnnnnnnnnnnnnnnnnnnnnnnnnnnnnnnnnnnnnnnnnnnnnnnnnnnnnnnnnnnnnnnnnnnnnnnnnnnnnnnnnnnnnnnnnnnnnnnnnnnnnnnnnnnnnnnnnnnnnnnnnnnnnnnnnnnnnnnnnnnnnnnnnnnnnnnnnnnnnnnnnnnnnnnnnnnnnnnnnnnnnnnnnnnnnnnnnnnnnnnnnnnnnnnnnnnnnnnnnnnnnnnnnnnnnnnnnnnnnnnnnnnnnnnnnnnnnnnnnnnnnnnnnnnnnnnnnnnnnnnnnnnnnnnnnnnnnnnnnnnnnnnnnnnnnnnnnnnnnnnnnnnnnnnnnnnnnnnnnnnnnnnnnnnnnnnnnnnnnnnnnnnnnnnnnnnnnnnnnnnnnnnnnnnnnnnnnnnnnnnnnnnnnnnnnnnnnnnnnnnnnnnnnnnnnnnnnnnnnnnnnnnnnnnnnnnnnnnnnnnnnnnnnnnnnnnnnnnnnnnnnnnnnnnnnnnnnnnnnnnnnnnnnnnnnnnnnnnnnnnnnnnnnnnnnnnnnnnnnnnnnnnnnnnnnnnnnnnnnnnnnnnnnnnnnnnnnnnnnnnnnnnnnnnnnnnnnnnnnnnnnnnnnnnnnnnnnnnnnnnnnnnnnnnnnnnnnnnnnnnnnnnnnnnnnnnnnnnnnnnnnnnnnnnnnnnnnnnnnnnnnnnnnnnnnnnnnnnnnnnnnnnnnnnnnnnnnnnnnnnnnnnnnnnnnnnnnnnnnnnnnnnnnnnnnnnnnnnnnnnnnnnnnnnnnnnnnnnnnnnnnnnnnnnnnnnnnnnnnnnnnnnnnnnnnnnnnnnnnnnnnnnnnnnnnnnnnnnnnnnnnnnnnnnnnnnnnnnnnnnnnnnnnnnnnnnnnnnnnnnnnnnnnnnnnnnnnnnnnnnnnnnnnnnnnnnnnnnnnnnnnnnnnnnnnnnnnnnnnnnnnnnnnnnnnnnnnnnnnnnnnnnnnnnnnnnnnnnnnnnnnnnnnnnnnnnnnnnnnnnnnnnnnnnnnnnnnnnnnnnnnnnnnnnnnnnnnnnnnnnnnnnnnnnnnnnnnnnnnnnnnnnnnnnnnnnnnnnnnnnnnnnnnnnnnnnnnnnnnnnnnnnnnnnnnnnnnnnnnnnnnnnnnnnnnnnnnnnnnnnnnnnnnnnnnnnnnnnnnnnnnnnnnnnnnnnnnnnnnnnnnnnnnnnnnnnnnnnnnnnnnnnnnnnnnnnnnnnnnnnnnnnnnnnnnnnnnnnnnnnnnnnnnnnnnnnnnnnnnnnnnnnnnnnnnnnnnnnnnnnnnnnnnnnnnnnnnnnnnnnnnnnnnnnnnnnnnnnnnnnnnnnnnnnnnnnnnnnnnnnnnnnnnnnnnnnnnnnnnnnnnnnnnnnnnnnnnnnnnnnnnnnnnnnnnnnnnnnnnnnnnnnnnnnnnnnnnnnnnnnnnnnnnnnnnnnnnnnnnnnnnnnnnnnnnnnnnnnnnnnnnnnnnnnnnnnnnnnnnnnnnnnnnnnnnnnnnnnnnnnnnnnnnnnnnnnnnnnnnnnnnnnnnnnnnnnnnnnnnnnnnnnnnnnnnnnnnnnnnnnnnnnnnnnnnnnnnnnnnnnnnnnnnnnnnnnnnnnnnnnnnnnnnnnnnnnnnnnnnnnnnnnnnnnnnnnnnnnnnnnnnnnnnnnnnnnnnnnnnnnnnnnnnnnnnnnnnnnnnnnnnnnnnnnnnnnnnnnnnnnnnnnnnnnnnnnnnnnnnnnnnnnnnnnnnnnnnnnnnnnnnnnnnnnnnnnnnnnnnnnnnnnnnnnnnnnnnnnnnnnnnnnnnnnnnnnnnnnnnnnnnnnnnnnnnnnnnnnnnnnnnnnnnnnnnnnnnnnnnnnnnnnnnnnnnnnntacaaaaaaaatagccaggtgtggtggcgggtgcctgtaatcccagccactcaggaggctgaagcaggagaatcgcttgaacttgggaggcagagggtgcagtgagccgagatcatgccactgcactccagcctgggcaacagagcgagactccataaaaaagaaaaagagatttaattggctcacagttctgcaggggttacaggaagcatagcacccacatcactcagcttctggggaggcctcagagagcttttactcatggcagcaggtgaagagggagcaggcgagtcacatagtgagagcaggagcaggcgagagagaggccagaggtgccacacgcttctaaatgaccagatctcgcrggaacccactatcacaaagacagctctgagccgtgagggatccgcctcatgatccacacaccttctgccaggccccacctctagcactggggatcacaattcaacatgagatttgggtgaggacagatatccaaactgtgtggacagaggtgatgctcctctacttgttgaactcttgaacactagtgaagagaatgctggtgtattagtctgccaggctgctgttgcagaataccatgaactgggcacttaagcaactgaaatagattttctcacagtgctggaggctagaagtccaagatccaggtgccagcaggtttggtatctcctgaggcctcgcccctgcgcttgcagacagccgccttctcactgggtccttacagggcctttttctttgagccagtgtagagagctctgttctttcttcctctttttataagcacaccagtcctatttaattagggtcccaccctatggcctcatttaatcatttgttgttgtgttttttttttttgagacgaggtctcactgtgttgcccaggttagtctcaaacccctggtcacaagtgatcttcccacattggcctcccaaagtgctcagattacaggtgtgagccattgcgcccagtctcatttaaccttaattactaatttaaaggtgccatcatggccaggcgcggtggctcacacctgtaatcccagcacttttggaggccaaggtgggcggatcacttgcagccaggagttcgagaccagcctggccaacatggtgaaacccccgtctctactaaaaatacaaaaattagctgggtgtggtggcacatgcctgtaatcccagctactcaggaggctgaggcaggagaatcacttgaacctgggaggtggaggttgcagtgagccgagatcacgccactgcactccagcctgggtgacagagcgagactgtctcaaaaaaaaaaaaaaaaagtgccaccaccaaagactgtcatattgggggttagggcttcaacctacagatttggaggaaacactatttagtccacaataactggagaagttgaatttagaagatgggggttggggccaggcacagtgactcatgcctgtaatccagcgctttgggagaccaaggtgggaggatcacttgaggtcaggagttcaagaccagactgggcaatatagcgagactccctctctacagaaaatttaaaaattagccaggtgtagtggtgtgtgcctgtagtcccagctactcggaggctaaggcaggaggatcgcttgagtgcatgggttgtaggttacagtaagctatgattgtgccactgtactccagacaggggaacagagcaagaccctgtctcagcaacaacaaaacaacagggagatagggggtcaggtgctgacttcaccttaacttcactgtgtgcttttacagcaagcctgttaccctctgtgagcctcaacttctctatgtgtaacaaatggccaactttatgggattgtcaagaagctgaaatgagaccctggctggaggatattttatggactataaattcctaaacaattataataacttagttatttatcctatccatggatcacctggaagtttacaatgtgatttaaaatgcattctatcattccaccgacctgcagtgaattttgttgtcattattactccagggatacctaaaggggaagtttgtttataattcgtacccactccttgtagaaaggattcaagacagccgatgatgaaaacacccatgcttgcaagtgaaggttctgcctgtcacttctcgcagaggctgcagaaaaggcccaggaggctgttgatgacatgaacgaccaccaggagaagctggagcaggctgatgcacagaagggcggagaagagggacacgtgccagacaacagctgcagagggctccaggcagayggagttccagagcgaacggtcatacagrtaattcctatcccaaaaaataaggagaccaggggtcaggcgataagtaaggaaagccaaacaggcaaccccagtagaaaactggggtctcccctgaccgggtcatgggactgggctcatgagggtgaccgttactgctccatttgcaattttctgagtatcagaggagcaagatgctaggatgtgtgacccaawggagcttgtagttcgtctgtgtgtctttttgtctctctctctctctctgtctgaaaagaccaagcccaagcctccacccatttacctactatgcaggtctttgaatgggtaaccatatttccaagcttgtgtctgattgaaggatgaaacatcaaacatgcaaaaaggaccatctttcagagcaactccagaagtgacaaagcaaatcagggctccaagtaaagccaggccacctgacaacagagcagtaagcacctgcggagggaggagaaacactgagctaagacggggtcgcagctggggagcctgcggagggaggagaaacgctgagctaagacggggtcgcrgctggggagtctgtggggcggtctgcacaggtctgacttctctggtctcagtgttcttccgtcctgtcatgggggagaattctgtccatggcaccccctttgaagcataacccatggtggggaggccgtgaggggtttctaggagagaaaggaccaagaagcagaatcgcaggccccggatctccctgaccgtgagttcgcctgagctgctcagcagcttggcatcacaaaccttttgcacattacagccattcagcctctgagctaaagaagaagctaccacaggcccaccactgactcttctaaggaaaagctgcattttcaaaagttccaggttcccaactctgattcttctctatttcaaatcaaggataaaaaaaaggaagggagggaaggaaggaaagaaagaagcaggaaagaagggaaggagagaagtgggagggagggaaagaagggagagaaacagcgagagagaagctgcagccaagctctgaaatgactccacttctgtcgctgtgtttctccagctgagagctttcttggccatcagtctgtgctcccactgccctcccagaaaataactgggtttccttccttgacaggtttctagcctgcttctacattggcttctttctcgttccttccttccttcccttccttccttctttctctctctctctttctttttgagacagagtctcactctgtcgcccaggctggagtgcagtggcacgatctcagctcactgcaacctctgcctctgagttcaagcgattctcctgcctcagcctcccaagtagctgggactacaagcatgcgccaccacacccagctaatttttgtatttttagtagaaatggggtttcactgtgttggtcatgccggtctcaatctcctgaccttgtgatccacctgcttcagcctcccaaagtgctgggattacaggcatgagccaccgtgcccggcccatattggattctttcttagggttctagatttttttctccctcccccaaaaatgcctattttaaaaatgtgaataacacctacatagcgtttttctgcagagtcatggagtcattctcccactgaggtcaagctggtttggagttggggagggatcagacaaaggtgcatagtaagttttgactctgagttaaaggagtcaagatgaatcagtaagcctagggcagtggttcccaaaatggggtccctgcccagccgcatcacatcacctgagaacctgttagaaatgcaaaacttccccgccatcctgaatcagaaactctggggagggagcccagcaatccgtgttccggcaaaagccctccaggtgattctcatgcacattcaagtgtcagaactacgtgccacggggaaaaccagaatgagaacagacagtgaatgaaatgtgcaagtgtttatttatttatctatgtacttatttatttatttattttgaaacggagtctcgctctgtcgcccaggctggagtgcagtggcgccatctcggctcactgcaagctccgcctcccgggttcaagagattttcctgcctcagcctcctgagttgctgggattacaggcgcccaccaccacgcccagctaatttttgtatttttggtagagacggggtttcaccatgttggccaggctggtctcaaactcctgacctcaggtgatccgcccatcttggcctcccaaagtgctgggattacaggcgtgagccaccgcgcctggcctatatttgattttttaacatgtaactgagtcagtgggcttcccaacatgtgggctgcagatatcagagcaggctgtggagttaccataaggccacagattcatgtctgagaacgagtgtgtgtgtgtgtgtgtgtgtgtgtttgttacacacacatatactgagatctttcaagtttatacagttgctgctgtaattaataaggtagaaatttattctgggcctcagtttatctgtaaaatggaggggttagattagaatctagtgattagatgatctctggaaaactttcctgttctaagaaaatattagttaaaataactaggaaaatttccatcaatgacacatgattacagtgtcataactcatgtccatattgtccaacaccctaagagagtaacagtttctcacactggtacagacgtctgggtcctcacactggtacagacgtctgggcttcactaagcactactcccttgacttgatcagctcccattttacagatgaaagcctgaaactggaaagatgaagcaacttgcccaagaacttagcgttactgagggtcacagtgaggacctgacttcaggccccaagaccaaaattgcctctttaccgccctgcctctagagtaatagaggtggagacattctgggtgttagaagagtggaatctggtgcttacgcttcgacagagcccactcttactgaagcagccgtatctccagcccatcaaggagatgaggatagctgcagtgagtacctgcaggagagagaagaatgttgagatggggaaatcgactttgccggctgtttctaggtgctgcccacagctgttagagtggctggcagctcacatgaacgcagtcctgttgactctgactctggggacccacatttgtatgacgagcctgatctaacgctgtggatgttaactttcacacccgacctgcctggtcccaagctaggcttcctgtctcttagagcttctacagacccaagatcagcttgttagaataaacttttctgcaaggaatcaaaacactcttcccatgccaccttcctgctccccgccggggtctctttgagagttcacgttcagggaaccccggacacttaccatgaggcctcctccccagagcccagttcccagcatggcatgcctgccaaggaggcccctcaacaggtaggtgacatcccagttaggaaggaggagtgccacgttggccccagcagcaaacagggctgcagtcccaaggctcagtcccaggatacgggagcaagtccgtgagcttgcctgcgtgcagggagaggacaccatcctggaacagatagaaagggagtcgcagcagctctgctgtggggggatggggaagggaactccagcagcatatcatgggtgagggaaacagactacagaaaccgccaccttccagggtcagaccaatgagagccaagcaacctgcttaaaaactctgctccttaggaatcttccccagtgactaggatttaattgtttccttttctgctaacccctgttcacacatacatagtttgcattccatcatattttgtttatgcctctattacagccagtgattatttctgacaaaaagaaatgtttaaaggtgtcttcatgatgtccattgtctccacttctattcaacgttgtactggtcctggccagtgcaatacgaaaataaaaggaagcaaaagccacacagataggaaagaaagaagtaatattgtcggccaggcatggtggctcaggcctgtaatcccagcactttgggaggctgaggcaggcggatcacgaggtcaggagttcaagaccagcctggccaacatggtgaaaccccgtctctactaaaaatacaaaaattagctgggcacggtggtgggtgcctgtaatcccagctactggggagactgaggcaggagaattgcttgaacccgggaggcagaggttgcagtgagctgagatcatgccactgcactccagcctgggtgacacagcaagactccatcttaaaaaaaaaaaaaagtaacattgttattattcacagataatgtgatcacattatgtagaaaatcctaaagtttattagaattaacaggtgagtttagcaacgtcatagaataaaagattaatatacaaaaattatattgtatttctatatacaagcaatgacaaattgaggattgaaattaaaatatatcatttacaatagcataaaaatataatacatatggatgaatttaacaaaatatttgcaagacctatatagtaagaattgcaaagcattgctgagaaaattaatggagacctaaataaatggagacatataccatgttcctgaaccagaagactcaaaatagttaacatgttctccctaaattgatgcaaagatttaaagcaatatcagtcaaaatcctaggagagttttgttatagaaattgacaaactgaatctaaatttatatggaaatgcaaagcaattgtgaagattagccaaagcaattctgaaaaacaaacaaagctggagaacttacgccatgtgatttcaagacttacaaagctacagtaattgaagacactgaagccacgcgtaaggaaacacatatggactactggaacaggctggagctcagaaacagacccggtccaggaaaaatgattttttttttttcttgagacggagtctcgctctgttgctcaggctggagtgcagtggcgcgatctcagctcactgcaacctctgcctcccaggttcaagcaattctcctgcctcagcctcccaagtagctgggattacaggtgcccgccaccatgcccggtaattttttgtatttttagtagagacggggtttcaccgtgttagccaggacggtcttgatctcctgacctcgtgatccgcctgtctcgggctcccaaagtgctgggattacaggcatgagccaccgcgcccggccaataaatgattttttaagaagatgacaattcagcgggaaaaagtctcttccacaaatggtgccggaacaatgcacatgcaaaacaaaactgccttcactattacttcacaacatattcaaaaattcacttgaaatggagcatgggtctaaaagctttataaaatttctagaataaaacaaaggagaaaaacactgggaccttgggttagataaaggtttcttactaaaatgcaaaaagtacaatccacaaaacatgattaatcagactgcttaaaaatttaaatgtcagctgggtgcttgcctataatcccagctactcggaggttgaggcaggaaaatcgcttgaacccaggaggcagaggctgcagtgagctgagatcgcgccactgcacttcagcctgggcgacaagagcaagcgactccatctaaaaaaaaaaaatcatgctaaaagaaataagccagacactaaaggacaaatattgtatgattccacttatatgaaatattcaaaataacaactttatagagaaagaaagtagactggaggttatcagggactgtggggagggaggagagaatggggagttattgtttaatggttacagaggttttcaggttttgttttgtgttgttttgttttttttttttgagacagagtcttgctctgtcagccaggctggagtgcagtggcgcaatctcagctcactgcaacctctgcctcctgggctcaagcaattctcctgcctcagcctcccaagtagctgggactacaggcatgtgccaccacgcctggctaatttttgtatttttagtagagacagggtttcactatgttggccaggctggtcttgaactcctgacctcaggtgatctgcccgcctcggcctcccaccgcgcgcggtggttttggggtttttttagagatgcagtctcactatgttacccc

SEQ ID NO: 94017 - DNA, 13617 bp, Homo sapiens
ctccagatatccagtgaaagattttggcagacagtggaaaatgtagcttttggattcaggaggtcatcaggtataaaggacaatgtctgtgtgggatttacagggaagtcgacaagggttgactaagaagccaaatggaggatccaggtaagctggggaacatgtggagtcagcgtgatctccaagtttacatgacacttctaggaacaggagaaaagatgagagactttaggaattactcaagtatgagaattagcaaaatgctcaagtagatgagggagaaaatcacagagaaaaaatgtctcaataactcaattaactggaatcatttaaaaatcactagggcaattccttgctggcaagctcagtcattttctagaaatgatgtcatatgaaataaaggctacaacctttatttctagcttctcatctataaattaccttgagaatcttaaaaaatgaaaataaagatcatcttctagcttaaaggaaaatatctgtgttcatgtgaggcagactcttgcttcgaccctcatgacatggaacacgtgtgtcctcttgtaccccaaacaggtgtggcttcatcagggtttcctttctttctttctttctttctttctttctttctttctttctttctttctttctttctttcttttcttttctttctttctttctttctttctttctttctttctttctttctttctttcttaacagcataaagaggtgttttttttttaattgtgtgtatgtaacattaggcaaaattatttaaagtcaataaatttttattcgaggaattccatcttgtgatttctttcattctccatcaaggtcactttagatcctctaaagaactggtgtcaaaatttatcttcaaaagatttatcttcaagttagccctttttactgaaactgatgcttattttaatccagttgtcctgtcagcccataattattttattttggtttttgtcatctcctttttacatggatatactgatgaagacttcaaaattcacctatggaaaaatcaagaatctttgaggtctaatttctttaaccaacttactttagggtcatttttagtataggtggatctgcctcgttctcaatttgatgccctaagcaatcatactcaatagtacagatgtgtggaatatgtcaatacctttaactccagacatcatgttctcaagataaaagcttttaaaaccaaatgccatcttctgtatcaagtcaacatgaaattggaatacaaatttaatacagctgaggatttccctcatatcccatgctttttaactatctattctacagtcctagaatcaatctttttgaaattaagagtcagggtctgtctttgctgcccaggttggagtacagtggtgccatcaaagctcagtgcagcctgcaactcctggggtcaatcctcctgcctcagcctcccattcctgagtagctgcaagtacaggcacatgcccctaaacccagctaatttttaattttttgtggagataaggtgttactttcttgcccaagctggacttaaactcctggcttcaagcagtcctccaacctcagtctcccaaagtatggggatggcaagcatgagccactgagcctggcctggaaccaacctctgtggttatcaatactcccatcagttaactgtctcaggtatcataatatcccttcttatatgtatcaaaactcatactgaacaatgagttccaggttgcaaaagaggacttattttttgcacctatccacaagtctttgtccacaagttaaacaaaaacatacagaagtgcagtcatcggggttttcttgaccactgaactccaaacatcatctttgcctgtgtgagcaagaaaacaaattctagttggactttttagtagttatagagaatgacaaccagcaaagcaactcaaaagattaaaagcaatgctcgaattgactcctaataattactcctattaccaaatggcagtcagtgattgttttctcccatttctcagtttttcacatgctttctgattataataaatttgtgaatcagcaggggaagaatgtagtatgaggaacttagatattcttgtgattgctgcagaaaacaaaataactgatgagtcgaagaaaactagtctgtgtaatggattttgtggcctttgaaattattccggccgggcgcggtggctcacgcctgtaatcccagcactttgggaggccgaggcgggtggatcatgaggtcaggagatcgagaccatcctggctaacaaggtgaaaccccgtctctactaaaaatacaaaaaattagccgggagcggtggcgggcgcctgtagtcccagctactcgggaggctgaggcaggagaatggcgtgaacccgggaagcggagcttgcagtgagccgagattgcgccactgcagtccgcagtccggcctgggcgacagagcgagactccgtctcaaaaaaaaaaaaaaaaaaaaaaaaaaaaagaaattattccaaaagttcataaagtgttttgtttcattcattttatttatttattctaaagatttttcattaaatatttaatcaaattaaataattataataaatagcatataggctgtgtagaatgctctggagaaaaagcaaagataaagaatggttggactctgccctcagggtgcttctggtctgctaagaaagataaggcatatacaagaataactacaatgcaaagtaaaatattgtcaagagcaacttgcatttctcttacagagtaactgttataaccagaatgacctttccacgataaacaactataaaaattaaacacaggcactatagggctgtgatacttgaaagaatgaaaacacataaattgagcttcctgatggctccagccttttgcctggaggcactttctagaaataatgcggagatgtgctgtccaagcagagaagagagatctcaatgaaatgggtagtcagaaatcagagttcaaggctgccaggcaggctgcatgtacaggaaagggaaaagtacaggaagaagtggtgctgagaagcagccatggaaatgtacatcgctttctccttaagttcttggaggaataccaagcagcacacagagacctcactgaaaaaccaggcatttatctgagacctgagagtgcagtagaagtgcatctatctactctagacctgtaagactgactttttttttctttcttttttttttagacggagtctcgctcttgttgcccaggctgaagtgcagtggcatgatcttggctcactgcaacctctgcctcctgggttcaagtgattctcctgcctcagcctcccgagcagctgggactacaggagtgtgccaccacacccagctaatttttgtatccaatctcttgaccttgtgatccacccgcctcagcctcccaaagtgctgggattacaggaataagccacagtgccctgccaagactgactttatatccacctttacaaagcttttacagaccattggaaaatgaagcaaaaactgttagtaaactgtctaccaaaaccaaacaatcactcataaaaaaaatcttggcttttgataaagtgatatttcacaatatccaccataattttcattttaattactagatataaaaaagtgaccaataactaatgaattttttgaaagtcagtaattatagacccagaaatgacaaagaggttggaattagctgacagatataaaggaactaatgagcttaatgagtgaacagatggggaatctcagtagagaaatggtaattgtacaaaatgtttacatggaaattccagaccttaaaacctaaaatatctaaaattagttaatcacttaactagttagtaaattggatactgtggaaacaatatcagaaaagctgaggaaatcgcattaaaaaataacaaaaagcacatagaataaaaatgctgaaatattaaataatgacagttttaaagacagtggggcaatatccaatgttctcaaatacatgcaattggactcctaggaagaaaggagaaagaaattgggatagaaaatgtatttgaagaaatagccccaaattttccaaatttgctgaaaatatcaactcttagatcctaagcattcactaaattacaagcagattgaacatatacacaataaaaacttgtataactatcatagacatatctctgaaaaaaacaatgataaaaagcaaacttttttttttttttttgttcaagacagtctcactgtgttacccaggctgagtgtagtgggacaatctcgggtcactgcaacctccacctcctgagttcaagcgatttttgtgcctcagccttccaagtagataggattacaggcatgagccaccatgcccagttaattttgtgtgtgtgtgtgtgtgtgtgtgtgtgtgtgtgtgtgtgtgtgtttagtagagatggggtttcaccatgttggccaggctggtctcaaactcctggcctcaagtgatctgtctgccttggcctcccaaagtgctgggattacagacatgaaccactgctccaggtctgagaaaaccttaaaaagcaacaaaacactaagtataatacaccacaaatagaaggaaaacataaataaaaagtattgtatttcttataaaaaagacagcaatgcaagccagaagacaaggaaattctatcttaaaaatactgaaagaaaagataacatgtcaatctagaattctataaccagtgaacatttttaaaaaatgatgttgaaataaagacattttaaaataaactaaagttagaagaattcagcaccacaaacttgcattgaaagaaatgtcaaataaggttcttcagactaaaggagaaaaatgtcagatggaaatttggattacactttgaaataaaagccatggaagtaggaactacactggtaaaaataaagacattttctttttttaaaacttgtttttaaaaattgaaccttaaggccaggcgtggtggctcatgcctgtaatcccagcactttaggaggctgaggtgggcggatcacaatgtcaggagttcgagatgagcctggccagcatagtgagaccccatctctactaaaagtacaaaaaattagccgggcatggtggtgcacgcctgtaatcccagctactcgggaggttgaggcaggagaatcctttgaactcgggaggtggaggttgcagtcagccaagatagcaccattgcactccagcctggacaacagagcaagactccatttaaaaataaaaaaaatttaaccttgttatcatggctatccttattcaaaccccctgaagctttactggtgcaattaccctcataattgcccacagacttactctgtccttactattctgcttagcaaattcaaattacgagtgagtccacagccgaattatactgctctcttaacgccttcaaccattacttccactaatagctttttgatgacttacagcaaatcttaccaaccttgccttaccccccaccattaatctaataggaggactccttgtaataatagcttcattctcctgatcaaacattaccattatgcttataggacttaatatattaaccacagccctttattccctttatatacttgtcacaatacaacgaggaacatgtacatgctatattaacagtattaaaccctcctttacaagagaaaatatattaatatttatacatctttcacctattctttttatctctaaaccctaaaataattataggctttataccctgtaaatatagtttagtcaaaatattagattgtggatctgataatagaagtctgtaacttcttatttactgagaaactatgcaagaactgctaactcatgcccccatgcctaacaacatggctttctcaacttttaaagtataagagcgacccattggtcttaggaaccaaaaatattggtgcaactccaaataaaagtaataatcatgcatttttccattactataataaccttaatctccttaaccttaccaatcattattaccttcatcaaccctcgcaagaaaaacttgtagccatattatgtaaaaatagctatcgcgtgcacgttcactattagcctcattcccacaacgtttatgtataccaacctagaagccatcacctcaaactgacattgaataacawttcaaacccttaaactctcattaagcttcaaactagactacttctccatgatatttattacagtagcactattcgtcacctgatctattatagaattctcaatattatatataaagtcagatcctaacattagccagttttttcaaatatttacttatcttcctaaccacagtattaattctggttactgccaacaacctttttcaactttttatcagatgagaaggtgtaggaattttgtcttttttactaattggctgatgacatggctgagcagatgctaatacagcagccctccaagcaatcctacgtaatcgcattggtgacattgacttcattttagccatagcacgattcctctcatcctctaatacatgagaacctcaaaaaatatttatcctaaatcctatccccgattttcttccattaattggccttctcttagcagcaacaggaaaatcagctcaacttagtctccacccctgacttctttccgccatggaaggcccaaccccattctcagacctactccactctagcactagagttgtggcagaagttttcctgcttatccgcttccacccattaatagagaataacatgttaatccaaaaccttaccctatgtttaggagctagcaccaccttatttacagcaatcagtgctttaacacaaaatgacataaaaaaattatagtattctccacctcaagtcaactaggccttataatagtcacaattggcattaatcagccacacctagcattcctacacatctgcacccacgcctttttcaaagctatattatttacatgttcaggatccatcatccacaacctcaacaatgaacaagacatccaaaaaacaggaggactatttaagactttaccccttacttcctcctcccttattattgacaggctagcacttacaggtatgcccttcctcacaggcttttactctaaatatctcatcatcaaaagcacaaacacttcatatactaatgcctgaaccctctctattactctcattgccacttctctaataagtttctatagtatccaaattatttccttcaccctaataggacaactctgcatcccaaccctaatcaacattaacgaaaataacccttccctaataaatccaattaaatgccttataatcggcagtatattcactggatttctcatcatcaatagcattatccctacttcatctccccaaacaacaatatcacttgatctaaaacttacagccctaagtgtagccatcctaggactcttactgtcaatagaacttagttttataactaatactcttaaaataaaatactcattacaaatattcaacttctctaatatactaggattttacccaatcacaactcaccgtacaacccaccataaggtatatacaaaataaaataaaatatacaacagtggaataaaggatgagggagcagtgaaagtatgttgttacacatctctcatctaatatgtgaagtggtatgtaatattgccttttcgacagagactgtgatatgctctccgtttgcatgctgcaaaccatagacccacctctaaaactaaaacaaaagtgtattgttaatgagacaataatcaagataaaacagaatacacacacacacacacacacacacacacacgcgcacacacacacacacaccacttattaatccaaaagaggtgaggacaagaagcaaagggaaacaaagaatagatgggccaaatagtgggagaaatgacaggatgtaaacccaattacatcaataattactttaaatgcaaacggatgaaacactccacaatttaaagtacaaattgtctgtctagaaaacacacatacaagattcactatatgcttttaacaggagatttattttacatataagaaaacaactaggttaaaagtacaatgatgggaaaagataaaacatgcaaatgttaatcataaaacagctggagtgggtagaaagtgtatgtttcaaggcatggagtattaactgagataatgaaggacatttcataatgataaaaagttcaattctttggccgggcgtggtggctcacgtctataatcccagcactttgggagacggaggtgggcggatcacgaggtcaggagatcgagaccattctggctaacacggtgaaaccccgtctctaataaaaatacaaaaaaattagccgggcatggtggcaggcgcctgtagtctcagctactcgggaggctgaggcaagagaatggcgtgaacccgggaggcggagcttacagtgagccgagctcgcaccattgcactccagcctgggcgacagggtgagattccgtctcaaaaaaaaaagttcaacttttcaaggagacatatatgctcaccttataaaagaaactcaagatacataaaacaaaaactgagataattaaaggagaaatagacaaatctgcaattataattgaagatattaactcttctgtttcaattattaatagaaactaaccaaaagtaaaacaaaaaatagtaaggatatagaagatctgatcaacaccctcagtacacttgacctaatacaacagttcatcaacgagcagcagaatatacatgctcttcaggtacacatggaatatttacaaagatgcaccatatgatgagacataaatctcattaatttaagactactgacatgacagagagtgtattttccaaacatagcagaagtaaagtagaaattaaaagcagaaagatatttgtagaatcccccaaatatttttgatttttgaaaatcaaaaatcacatttttttttttttttgagatggagtcttgctctgttgctcaggctgcagtagagtgggcgatctccgctcactgcaagctccgcctctcaggttcacaccattctccagtaacttaccttcccaccagacagctaaagttaaaaggattgacatcaggctgggtgtggtggctcacacctataatcccagcactttgggagaccaaggtgggcggatcacctgagatcacgagtttgagaccagcctgaccaacatggagaaaccccatctctactaaaaatacaaaattagccaggtgtggtgacgcatacctgtaatgccagctactcgggaggctgaggcaggagaatcgcttgaacctgggtggcagaggttgcggtgagccaagattgcgccattgcactccagcctgggcaacaagaatgaaggtccatctcaaaaaaaaaaaaaaaaagactgacaccaactattgaagaggtaggcagctgaatcttattcattagagtataaaaggttttaaacactttggaaaatatggcagtatttatccatgataaatgaaaatgtatgtgcataaagattgttcatagtagctttcttctaatagccaaaaaactgacaataataaattttcatccatgaatgaacaagttatgttgtactcatccaatggaatacaactaagcattaaaaataatcaacaattgataggtgataaaatatggtttactctcaaatatagtttaagtgaaagaaactacaatattaaagaagacactattatactgaatgattccttttatatgaagtcgtagaaatagtaaaaataatctgtagtcaaagacatcagaacactagttgcattcggcaaggagtagtagtggagactgactgtccaagggccatagggaattttctgggataatgcacatactctgtatctctatttcaggggtatgcatttcttagcacacattaaactatactattgagaattgtgcattttactatatataaagttgttcttaagtaaaaacagtaaaaagggaaaaaaagtggtcaagaatttaacacacaatgtgttaggatagttatgatgggaaaaaaagattgtgttcattctgtgaagcaagtattgtggatatcttagaaaaggtgatatttcttctggcccttaaaaattataagggattctggaccacagacattgtgggaaggaaattccagtaagatttatgtataagagtaagcaaaggtataattacagaagtatgtgggatattcaatgagcaacaattaatttcttttagctaatgagtaaaaggaatgatgaagccagatggttgaggaattcaaagggaagaagattggattttattctataggtaattgagggacacaagtgattttgcacaagtgagtgaaatgatcagaactatggttttgaaggtataatacaaatgacaaagtgaatgaataagagaaagagaagaaattgtgaggctcttgaaatattccatctagataaaatgaatacagctgccgtaggaaaagaaaggagggatcaaatcaaggaacaaaacattctgggtgtaaatcagaaaaactcagcacatgttggaccaaaatagcaaagaaagagtagggctaaataatgatgtaagttttcaagttataattgcccagtagagtgttgacaacataaataaaatttcttgggtctatttctgaatttgccttaagtaacaaactgtttaaataatatttttaaaaaatatagtaatggtttaatttgtgtcatgcttgaaacagactgaaagagtgtctggagtttaatgaagaccagttgtatgtttaggcagaggttctcctggtttccttataagaaagaaactgtcgaaatttccacaactcacttccaccccagccaaatatgcctcttatgctactttcattcgttttcattaatactctacttccattagaaataaaaatacctcctagaaggtgtcacatacacatccattactattttagtctgaatcagtgtcttgaaaaataacttcgtggtcatctgtcaggccacagagtcatgacatggagatcaggtaagtttcaaagaaacagtgggggtggcggggggaaagcatcaccttatagatccctgaagtaaggagtctgggaagccaggatgaaatggagtcatgaggacgcagcctctctgaaccaatgcaatgaagggaagggagaagaaaaaagcagagggaggcaaagatgtgggagagtaatttctatccatttcttaactgtaagaccaaatagtgacacaaagcaaacagcaaaatctccagtagctgtagcataggcaagcacattcagtgtcagtcataatgaaagaggatgaggaattgtctttattcaggctgtggtaacaaaataccttagactgggtaatatataaacattgcaatgggtctggaggctgggaagtccaagatcaaggcatcagcagatttggtgtctggtgaggacccttccctcatagatggtgctttccatgtgtcctcacatggtggaagaagcaaggcagctctctggggcctccttcacaagggcataaatcccattcatgggatggcgtcctcatggcctaatcaaccccaaaggccccaccttctaatatcatcaccttggtgattagatttaaacatacaaatttttggggaacacagacattcagacaaggaattggctttgtgccagcaccatcacttccattcaggcaaactgtgaaagagaggactcaagatgtgtagtaatcactggtatctttgggtttcttcctctcccatcaatcactatcaaaaccaacttcgacactcaggtacagaaaaatgattaacccctgaaaatgttacttgctttctgtataaagtatggtagtgtagctcaatggctttcacctttttggcccaaagtaagagatgcattttacaatatgtccttataagcacaggtatataaaacagacaaaactgatactgaattctcttccattctattctatttcatcccatctcctcttattccatccattccactgcactctactccactctactccatttcattccattctaatttgttctactttatgtcattaaaaaattctggtctcaacctatgcattgatgtcatggctcactaaaagattgagaatgacaatttgaaaagcacagacatgttgtatcagagttcaggctgtgtgtgcaggtgtgagttcctctatgtgtgtctatatttaacatgtaaatgtaccccttactctgtaccccagacatgtacattttgctatcctcagtcctatcatatgtaataccctttttataactaataggttgaatcactcctttactttcctggaaaaaatcaagtgctaatgtaacacacagtgctcacatagtattaagcaattattatactaatataaaatcaaagagaaatactttatgataaaaatatggatttcatgcccaggcacaaccacactaaaagatgtaccaattttttctgtgtttttttttctttttgtggagaacagggtcttgctatgttgcccaggcagatccggaactcctgggctcaagtgaaccccccaactctgcctccctaagtgctgggattacaggtgtgagctactgcaccgagccagactagaagatgttataaagtgatcccactcacacctatgcatacagtcaccatgaacctgaccactccaaatttagatgactgtaagggtgttgtattggaggctcacatactacagttgtgatgtcagcagctacctgattttccaaaatgttgaacaactcttggtaaagttctgatcaaaacaaatttgtattcaggtctatcttcactcaagtaagctttgcatcattagtaaatttattgcatattaaaaccctgcaaatgttatttgtatttatgtataaaacagatttaggttttaggatcagaaaattagataattggttacatgaatatccagaaacaccctaaagttgtgtggggctctctcactcattgcagaagatttaacatccttggcgtctattctccaaatgcatcctctcctaatctgtgtgaaaatcaaaactgtcctataattttctaactgcatcatcttttttgaaaacacaattctagagtaaggcagccctgccatttatcaattgtttggttttgggcaagctgttcaacctaagtcccaaatgtcctcatcaataatattgagaaaatataaagaactattcaacagtgttttattgaagattaagttaagtctgatataatagcacagtgcctagaaacacagtgagcagtgtaatagttgtgtgtaatcttaataattgttattttagagggtctctacattactgctgtaataaaaatgataataataattgaacttcaaaatatactcattctatgacatacaatcgttcttctagtacagaaataatcaaatagtatacaaagatttttacacaaatgtaattgctacaggattatttaaaacaagagaaaatgtgaaat

SEQ ID NO: 94018 - DNA, 41202 bp, Homo sapiens
ggcgtgtgcctgtagtcccagttacccaggaggctgaggcaggagaattgcttgaacccaggaggcagagctgcagtgagctgagatcgcaccactgcattccaacctgggcgacagagcaagactccgtctccaaaagaaaaaaaatagccacgtgtggtggcacacacctgtggttctagctacttgggaggctgaggtgggaggatcccttgagcccaggagtttgaggctgcagtgagctatgattgtgccactgcactccagcctgggtgacaaagcaagaccctgtctctaaaaagtaacaataatcggccggcacggtggctcatgcctgtaatcccagcactttgggaggccgaggcaggcagatcacaagatcaggagattgagaccatcctggctcacacagtgaaaccccgtctctactaaaaatacaaaaaattagccagccatggtggccagtgcctgtagtcccacctgctgcggaggctgaggcaggagaatggcatgaacccgggaggcgaatctcgcagtgagccgagattgcgccactgcactccagcctgggtgacagagagagactctgtctcaaaaataaaataaaataatttaaaaaaaaacaataatcttaatttcagtcactccctctatattccccatgaacaatggaattttcccagaatatcgtctacatcatatacaaaatcaataattatatcttttctcttccatttatttttcaccatttattttattcactggtctgtatttatttatttatttatttttgagacagagtctccctctgtcacccaggctggagtgcagtggcgcgatctcactgcaacctctacttcttgggttcaagagatcctcctgcatcagcctcccgagtagctgggactacaggcacaggccaaaacgcccggctaatttttgtatttttagtagagatggggtttcaccatgttggccagtctggtcttgaactcctgacctcaggtgatctgcctgactcaggtgatctgcctgactcagccacccaaagtactgggattacaggtgtataatctgccaccctgcctagccacattttccttctatctctacccacagcccttcaaccccagggatcactttgtgccttatctttatagcaccctatgctaaacaggtgccacatctaagaccaagaaatagcatagagtcttcgaacctctcaagacctgagtgaaagcaagagttaaaaactcaaatgcctgtgtagaagccagacaggtacatgggggaggtgaacaaagtgaagtctgtggagaggtgagaatgcaagtccagctactgggggccatcactgctcagaccagggttgcaccacgtttccatttttcaagagaagccagttatttaggcttttatataaaagctctcccagtttttgtttgtttgtttgatttttgtttgagacagagtctccttctgtcacccagactggattgcagtggcatgatctcatctcactataaactccaccttccgggctcaaacaattctcctgccttgtctttccaagcagatgggattacaggcatgtgctaccacgcctgactaatttttcatttttagtagagacagggttttgccatgtcgaccaggctggtctcaaactcttggcctcaagtgatccgaccacctcggcctcccgaagtgctgggattacaggcgtgagccacgcctgttcagctctcctaattctttttttttttcccccctggctggagtgcagtgacacgatctcagctcactgcgacctctgcctcccagattcaagctattctcctgcctcagcctcccaagtaactgggactacaggcacgtgccaccgcacccagctaattttttatatttttattagagacagtgtttcaccatattggtcaggctggtctcaaactcctgacctcatgatccacccacctcggcctcccaaagtgctgggattacaggcgtgagccactgcacccagcctccaattcttaaatgttcaatctttcatcagatttttaagaaacagtgtgtgggccaattacacatgcctgtggccacgccccttctccacctgccagaagagactagtgggatgatgagattcttgcccttcagaaaaaacaatggttgccaagggagcattagctacggtacccagagataaatgctggaatggaggtgagctcctggcccatccctaccctatgggtctagctcatgctcttaggcttaaaggagaactctggcttccagcaaagtgcagagcccactcctggaacacacactggcaacaggcacactgtcatggatggccacccctaactgcaatgtggatgaggaacctgggtggggtgtcagggctttttaatatttatttctccttctctattttttgcctcctctaaatcccttagaaaagtgggaatcagatggcaagatacagaaaggttctcagagtgttgtgcatctgtgtgaaaatctaaaagaaaaaaaactgggatgaggatttaggaataagggaagatggacctctcaggtataatgggaaagcaagcagtgctggtctccatggttgaagatggtaatcattccttacagaaacagctaacatttattgagtgcttgctataagccaagaatgtttatgtggatactctcttttttctgtttttaaaaataataactatttatataggatgatctcttttgatcctcgtaagaactcttgaaagtagccatcatttatttttatttttatttattttttgttagcccagccctgtcctgggtagccatcgtttttatctccattttatagatgaggaactggggttcagagaggctgtcatttggccaaggtcacatggacaataagtcttgcagaaccagattccagctctggctgtctgagtcccgaatctgagcgcttaaccatcacccatatactgcccttctctggagtactgcccagtccccctgactgacaccgctgtgcccctagcacctagcatagtgtttgttgaagaaagatgaccattcaccattatcatgtagtccctataattggcaagttaataaatacttgtttagcatgttctctggatcaggttttatgcagagtgctatggatacagcactgaatcaaacaaagtccctgccctttaagggcttatattctaatctagtggatggagacagacaataaacacacacacaaagaagtaagttagcttctggtagaaataaatgctgagaggccaagcgcagtggttcgcgcctgtaattccagcactttgggaggccaaggcgggcggatcacttgaggtcaggagttcgagaccagcccagccaacatggcaaaaccctgtctctactaaaaatacacaaattagccaggtgtggtggcgcatgcctgtaatcccagctactcagaaggctggggcaggagaatctcttgaaccctggaggcagaggttgcagtgagccaagatcgtgccattgcactccagcctgggcaacagagtgaggctctgtctcaaaaacaaaacaaaacaatgaaataaatgatgagaaaaacagaatacatgataaaactactgggaggctggaatgggaggggtggcaagcgctgttagccacagtgatccaaggcagcaaagagaacatcagagctcagatctgaatgttaggaagaaagcagctattggaaaatctatagtagagagttctaagaagaacattgaatgtcatgaagatattgtaaaattaaaaaaaaaatagaaaaaaattttaaagaggaacagcatgtgcaaagaccctgagtcacgaaacagcttggtatgtccgatggacataccaagaaaaacaaaagaaaaagaaagtccctgaggctggagagtggggagggagatgaggtcaaagcagcaggcaaaatgctagatcaggggtgggcgtggtggcttacgcctgtaatcccagcactttgggaggctgaggcggatgggtcacttgaggtcaagagttcgagaccagcctggctaacatggctaaaccccgtttctactaaaaatacaaaaattagccgggtgcggtggcaggggcctgtaatcccagctacccaggagactgagacagaagaatcacttgaatccaggaggctggaggttgcagtgagctgagatcgcaccactgcgctccaggctgggcgacagagtgagactctgtctcaaaaaacaaacaaacagcggccgggagcgatggctcacgcctgtaattccagcactttgggaggccgaggtgggcagatcacaaggtcaggaaatcgagaccaccctgactaacacagtgaaaccccgtctctactaaaaatacaaaaaaattagccgggagtggtggcgggcacctgtagtcccagctactcaggaggctgaggcaggagaatggcatgaacccgggaggcagagcttgcagtgagcggagatcatgccactgcactccagcctgggcgacagagcgagactctgtctcaaaaaaaaaaaaaaaaaaaagcaacaacaaaaaacagcaacaaaaaaaccaaacactagatcaggtgaaagcctgcacaccatgggtaggaatttgggtttcatcttatttgcagtgggaaggcactggggaattgtaggcagggagtgggtatcacttgatttacaatttgaaaaggtctgtctgactgccatgtggacaacagattgcagaagaatcaaggtagaggtgagagatcaattaggaggtggttgcagtagttcagaagatgattttgaaaagtggtcatattctgggtaaattttggaggaaaaggtagcaggattaaatagactgtggagtattaaggagaaagaaggctgggtgtggtggctcacacctataattccagcactttgggggccaaggcaggaggatcacttgaggccaggagttcaagacaagcctgtccaacatagcgagaccctgtctctatataaaaatcaagagtaaaagaaaaaacaaggagagaggcaccaagtataactccctgattttttttttttctctaactgggtgagtggtggtgctgtatactggggtagaaaaagcttggggaggaaatgatttgggaggtaggaggaatctgtagtcttattttggttctgttaaagttgagatatcttatcatccaatggaagatgttgaatagtcaggtaatctggagctcaggatagggatcaagataagagtcagggctagagataagatttgggagttacctgataacatacatacacacattcatgtatatgtgtgtgtgtgtgtgtgtgtgtgtgtatctatattacagccatgggactcggataaaatcacccagggaaactgtgtaggaagagaagagagccctatgtgactgctacatatacaaggtgggaagagagtgagccaagaaaggaaactgagagggaccaatcagcgtggcaagagagatgccagagcagaaagtctttttttttttttgagacggagtctcgatctgtcacccaggctggagtgcagtggtgcaatctcggctcactgcaacttccacttcccaggtttaagcgatgctacagtagctgggactacaggcgcgcaccactgcgcccagctaatttttgtttttttttttgagacgaggtttcaccatgttggccaggctgctctgaaactcctgacctcgtgatctgcctgcctcggcctcccaaagtgctgggattacaggtgtgagccgccgcaccaggctgcacccccagaaagtctttcaaggaggcagtagcggtcaactgagtcaaagttgcagaaaggttgagtaagataagaagggagaatgtgaaatgaagcgaggctaattaacaaagacaacactttcaaggggctttgctgtgtgcagttgtagaaaaatggcacagaactggaaaagaacacgaattcagggaggcattttgctttttgccttcttcctgctggaagataataaacctccttttcctagtgatgagaatcgtccagtagaaagggagaagtggatcaygcagaagagaaaggaagtggatcatgcagaagagaaagaggataactgcaggggtgaagaacttgggaaggcgagagggagtaggagtccgagcctaagcgtcagtggaaccaacaggagggaaggagagaatgtaggagatacataaggaagtaggggacacggtgcgggtggggaggtgagtgctcagtatctaaaaagatactgatgctggtctttagggtgaatgcgaagtcatagctcccaatgatgaagcacaaacaggtcacatgtaagtcctgcatgtgcattcctctgacaatggggagtaggtggctaggacacaacagtaacatcacagagggagcttagctcaaggatagaaaactggggagacctttgtttgctgtgcctggcctcaccctctgttcattactcctagagtgactggtccttatcaccccagctcctttttgtttttctgtctcctgccttttccagaagtctgttgaactcaaagggctgaatgacagcagtcttccctccgtgactgggaaactacacgggaggtaccaaaggggaacagagctatgcctgtggtggtgaaaccctttaactgcaattagagccttattccctgcctaaagcctttttttttttttgagagagagagacagagagggtctcactctcccctaggttggatggagtgcagtggcacaatctcagctcactgcagcctcgacctactaggctaaggcgatcctcccacctcagcctcccgagtagctgggacttcaggcatgtgccactacacctggctaattttactttttgtagagacggggtctcactatgttgcccaggctggtctccaactcctggcctcaagtgatcctcctgctttggcctcctgaaatgctgggattgaaggcctgagtgcccacacactttcactgggtgatctttatccaagtcccacctcgcctggcccaaaagcccccaccccttttttttttcccctgaggtggagtcttgctctgttgcccaggctggagtacagtaacacartctcggctcactgcaacctccgcctcccaggttcaagtgattctcctgcctcagcctcctgaatagctgggattacaggcacatgccaccatgcctggctaattcttgtatttttagtagagaaggggtttcgtgatgttggccaggctggtctcgaactcctgacctcaggtgatccaccygcctcgccttcccaaagtgctgggattacaggcgtaagctaccatgcccagcggtgtatacacacacacacacacacacacacacacacacacgcacacatttatggtctagagaagagaggcctatttcttttacatgaagaggtttgtatgtgaatcacctatgggactaaaagtctttcctaaaggaagccaagtaagaaaagtttaatctgtaaagccttactactataagatttttttttcctcatcactgtgattacctggagatataagtattattgttattatttgtttttcttaaacagaggtggagctctccctgtgttgcccaggctgktctcagtactactgggctcaagcaatcctcctgcctcagcctcccaaagagctgggattccagacgtgagccactgtgcccagcctacttttataactcatcaaaaagcgaagtggctaagggagaaaagcatgttaacctctaccaaaatactaaactggaaggcatccctggaatggggaagattagagaacagtatggcctcaggagcacagaaatcactgactacagcttttcttttgtgtactgatcacacagggaaagaatcaagaaggggtgagaaggcatgttaaagcctttcctctgataatcttgaagcaatcagagaaacacatctcactagagaaaaaacactcacagaggaagagagcagcatacaagcacttctgaggctgagccagcctgaattccaataacccaacatgcaggaaaggatttttttttttttactctaagttaacagaatcatgttctaatcaaggtctgtgaataaattaaggatactctttatgaaaaaaagtgaaagacaccaatttggcatggcatttggcaacacttcaggtttagttgttttaatagtttgatttggtttttaaaaatgtgggaggcagggtgtggtggctcacgccggtaatcccagcactttcagaggctgatacaggaagatcacgtgaccccaggcattcaagatgaccctgggcaacacagggagagcctatctctacaaaaaaaaatttttttttttaattagctgggtgtggtggtgtgcgtctgtcatccccgctacttgggaggctgaggtgggaggatcgtttgagcccgaaaggtcaaggctgctgtgagccatgatcacgccactgcactccagtctcagcaacagagcgaggccttgtctcaaaaaataaagtaaaaaagcaggggtaaggaaagtacaatggccatctgtttactcagataaattgactgtatcagccaggcacggtggctcacgtctgtaaacccagcactttgggaggccgaggcgggcggatcatgaggtcaggagatcgagaccatcctggctaacaaggtgaaactccgtctctactgaaaatacaaaaattagccaggcatggtggtgggcacctgtagtcccagctactcgggaggctgaggcaggagaatggcgtgaacccgggaggtggagcttgcagtgagctgatgctgtgccacagcactccagcctgggcaacagagtgagattccgtctcaaaaaaaaaaaattgactgtatcactaaagcttcagccaaccttcatcattttgagtaggggagactttggggaagttgaatctccaagcatatgaagtgaatgcaacaaatatcatcacgggacatgtgatcttccttctttagcagggaataaggctctattgtatcaggttcctagattagataaaagggtgtgcttggatggcaggcacagtggttcatgcctgtaatcccagcactttgggaggctgaggcgggcagatcacttgaggtcaggagttcgagaccagcctggccaacatggtaaaaccccgtctctactaaaaatacaaaaattagccaggcgcagtggtgcgtgcctgtaatcccagctactcgggaggctgaggcrggagaatcgcttgaacccaggaggcggaggtcatagggaactgagatcttggaaataagttaacaatgaggaaagatagaatatgggggcagacatggggtggttaatacaagtggagaagccttccagagggcagaagggaagttctaggcatggactggagggagagagtcctccagctgtacacgttgacttcttgctataggaaccgtatcctgacgcagacgcgatgcggtgttccatcaggaaatgcttcatactctcagtgggcatcgtattcctgtggcccttcatcactttgaaaatccccaaggaaactgaagatgatcaaaatgtgatgactgtcaaaggccaagtagcaagccttgagccttgctcagtttgggaactgggaatatagggtggaaatggtgtggacaggcagattctggaaagcccctgggctttcttccttcctgaccttttcacctgagagcaggaagctccaaagggaatgggggtatggacctgggcctattagtccatgaagaagctgtatttattttccttattcgttaaggtaaagaagacagcaaatactgcttgagccctggatattttagccaatggccaggcatcctgagaatgtgccaggctcactctagggagaatggttcactccacctctttccctagaaaagcttatgggaagccactggggtgtaaaatttgttctttttatgaaaggatatatatgtttgcccttgtcaatgcccccggaggccagttataacagccggaaggacccaagatcactagaagactggcagaacctcaccttcaaatatatggaaaaaatccagaagagaagaaagagtgagtaccaacaagaaggaggaattcagcatcccaggggaagtagggacagccagagagatcaggcagataggaaggaaagcagaagagggaaggagaaaaacagactgtgcccaggaatattagaatccggcagacaatggccaagtgtggtggctcatgcctgtaatcccagcactttgggaggcctaggtgggtggatcacgaagtcaggagttcgagaccagcctggccaagatggtgaaatcccatctctactaaaaatacaaaaattagctgggcacagtgggggacatctgtaatcccagctactcaggaagctgaggcaggagaatcgcttgaacctgggaggcggtggtagcagtaagccaagatcgcaccattgcactccagcctgggcaacagagtgagactccttctcaaaaaaaaaaaaaaaaaagaatctggcagttaattctctcctccttccccaaggcaaatatttatatatcagcagtatgaggaggaaggaggaaaaagataaagttggctactacttttctttttttcccttcttggccagttactaaagttaattgctataagaaggtggaatcactagattagagaacatttggatcagaaggggtcttagagtcgcatagtccaactcccccagtttatggatcaggaactaaactcagggctgaagggacttgctcaagatcacacaatcagtggcagaactgggacaaaaactccaggctcctgacttccaggggaagtccttttcctaatatacctccttcaaagggcagctttgggaagacgacaacaattgacaacaatataataatataattgacaacaattataactattataatagctaacatttattgagcccctaaaccatacgccacaaagttctaggctcaaagaagactgagcagaacccacagacactcagcatcacctagcttagtacttctcaaactttactgtgcatacaagttacctggtgatactgtgaaaatgcagcttctgattaaatctgagatagggatcgagatcctgtatttgaaatgagcttacagagcagcctgatgttgctggactaaggaccacacttcgagcagcaaggatgtaaacatcccctccaccaagggaaaaacaggtgggaaataagagggaggaaggaagagtgaaggtcccacataggatcccaacccctaacccttctgacaaccgtcactattactgtgcactgacagttgtccctatttttacctctcctcagcatggctgacagtggggaatctcatcagtgcagcaaggggatggaagcagcctcttgtacacattggtctccctgttccgtgtttcttctaaggctgagcagaaacgtctcacggtgctggtccacctggcagattctgacctcacctggctcagagaaactcttgcccatatttcaagcctcttcagcccacagatcttgaaagggcagttgctactgatccatgcttcatccgatgcctaccccactgtggagagcatcagggatgaggcctttcatggcgaattctactccaagcagaacgtagatcatgccttcctcatgagctttgccacaaagttctctgattacttcctgttaatagaggacaatgtcttttttgcccccaactttgtcacccacattcattcaagggtgaccaccatgaagtccaactcgtgggtgctaatggagttctccaatatgggcttcctyggcaaactcttccacagcagggacctcccactcctggcccatttcctccttctcttctacaaggagaaaccccttgacagcctgatttctcatttccatacgctcctkgtccaggaaagcccaatcctctgcagrcctttcctattctactgcagggtctcctacactgcctttgatcacaagcagaaggccacagcacttcagaaaaagaatgccgatggtcccaacaacccgcctggagctgtcttcactgatatgcaggtttccgatgtgcatttccyctgggaggcctacactctggatgagtcattcttttggacacacaacattagtataggaaaccacctgacagtgattctgaaccatccagcaaacctgagcagggtgcaagtgatgacgggctccattgtggaatgggaggtacgccctggagaaggggcaggtggagctgggctaccaacctgagggggtgccgcagcactgcaccagcttcgccttgctgggacatctttcggaggggcagatggatcagaagatacttctgaaaggtatggggtaccacgtgagctgtgtgaggctggtggtgaaagctggtcaggctggggggctcatgatcaggcatatctacctctgggagaaaaatgacaaatagcaagtggatcaatgctgaagataaatcagtagggggatgaaaaattaaaatcttaaagccacttcattctagtctatatgagtgacataggggagacacaatggaatgaagggcagacagagaagactatcagtctgttggtgccgccaagatgtcaggagacttgttgcttcctttctatccaaacaactctcataggatatcttttgctgtggcatatatagcttatccgaatttggggagagttttggtcactcccaaaatatttagatacctgggatgctgagatcagcccaaatcaaggtgtccctgtgtatacatgcgtgtgcatgtatgcacttctatgttcacacggaggcagaggtggggatgaggtatgtggtcacaggagggcaggcaggaaaatcacggctgaatccctagaattgacatcataaaaagccatgaaagggactctcattagaagttaaaatctccgaagtgcaggaaagtagcagatggacaaatagcaataaaacgaatcccttagctctattattgaagctgtttcacagtgccaatctagttccctcctttcctccccaacaaacttgggcacaaataggttttaactaggctgggtatggtggctcatgccagtaattgcagcctcccttaggaggctgaggtgggaggatctcttgaggccagcagttcaagaccaacctaggcaacacggcaagaccctgtctccacaaaaaattaaaaagttagccaggttgtggtggcatgtgcctgtggtcctagctactcaggaggctgaggcaggaggatcacttgagcccaggaggttgaggctgcagtgagccatgattatgccattacactccagcctgggcaacagcgtaagaccctgtctccaaaaaaaaaaaaaaaaagtttgtaactaaagcttcactcatcagcaattcattccttaactctggtttctgtgtccacactggcctctgcatccacaatgctactgaaactcttccctatttgtcatgacgagaatagtcaaaacccagtgactttttcagatctcattctccctaactttctgcagcaatacacagttctaattatgtcttccttctcaaaattgtcctcttcctttacttctgggactcatcagatatttattgagtgcctactacatgccaggcacaaaaaaagctcctatctgtgaagagggtttttatgggagtaagatatacacaggtgtgttaagcatcacattgaggttaagtacagggtccttgggagcacagaattgctgttcccaaaacattcttgaggatttaggaaaggctttctggaagatgtaacatctaagcctagacctgccagatcattagagaaaatagccaagtgatatgggaagagaggcagggagactttccagtagaagaagcagcatgcggtgaagtgggccaaaggtgagacagagtaaatcatttagtgaatctggagatggagggcaagcctgggtgagggtaacgcagaagatgaagccacaggactaagaaagggccagcttaagaaggtcaaaggaggtcaggcgcagtagctcatgcctgtaatcccagcacttgggaggccgaggtgggtggattgcttgagtccaggagttcaagaccagcctggacaacatagtgaaaacctgtctctacaaaaaaaaaaaaaaaaaatagccaggcttgatgtcatgtacctgtaatccccactactcaggaggctgaggcgggagaatcgcttaagcatgggaggtggaggtctgcagagcccaatcctctgcagacatttcctcttctaccgcagggtctcctacaccacctttgatcacaagcagaaggccacatcttgctgtgagccaagattgcgccactgtactctagcctgggtgatagagtgagaccctgtctaaaaaaataaataagtaaaaagaagggccatagataatcaagtggcagaaagaattgtcttttcaacaaatggtgttggaacaactgaatatctacctgcaaaagaatgaagttgggctaggcctggtggctcacacctgtaatcccagcactttgggatgccaaggtggaaggattgcctgagcccaggagttcgagaccagcctgggcaacatgacaagacctagtctccgaaaaaaaaaaaaagaggccgggcgtggtggctcccgcctgtaatcccagcaccttgggaggctgaggcaggcggatcacctgaggtcaggagttctagaccagcctcaacatggagaaaccccgtctctactaaaaatacaaaattagccaggcgtggtggtgcatacttgggaggctgaggcaggagaatagcttgaacctgggaggcagaggttgtggtgagccaagatcacgccattgcactccagcctgggcaaaaagagcgaaactccgtctcaaaaaaaaaaaaaaaaaagaaaaagaaaaattaaattaaaaaaaaaagaatgaatttggacccctaactcacatcatataaaaaataaggctggacatggtggctcacgcctgtaatcccaacactctgggaggctgaggcaggtggatcacctgaggtcaggagttcaagaccagcctggccaacatggtaaaactctgtctctaccaaaaatacaaaaaatagccaggtatggtggcatgtgcctgtaatcctagctactcaggaggctggggtaggaggatcccttgaacccagaaggtggaggttgaagtgcaccgagatcaggccactgcactccagcctgggagacagagcaagactccatccccctcaaaataattaacataaaaaagcattatagacctaaatgtaagaactaaaactataaaattcttagatgaaaacaaaaatatcaatcgtgatcttggattaggcaagtttcttagatatgacaccagaacacaagcactcaaagaatagataaatcagacttcaacaaattaaaattttttgtgtgcttcaaagcaactattaaagtgaaaagacaacaaacagcatggaaaaaaaatttgcaaatcatgtatctgataagagactggtatccagaatatagaaagaattatttatttatttatttatttatttatttatttatttatttatttgtttttgagatggagtctcgctctgttgccaggctggagtgcagtagcgcgatctctgctcactgcaacctctgcctcccagtttcaagcgattctcctacctcagcttcccgagtagctgggactacaggcgcgcaacaccacgctcggctaatttttgtatttttagtagaaacagggtttcaccatgttggccaggatggtctcaatctcttgacctcgtgatcygcccacctcggcctcccaaagtgctgggattacaggtgtgagccaccgcgtccagccacagaaagaattcttacaactcaatgataaaaagacaaataacccactgtaaaaatgggctaacggatttctccaaagacaacataccagtggccaataagcacatgaaaagatttcatcatcagtcattagggaaatgcaaatcaaaaccacaaatgaaataccacttcacacccaccaggatggctatttttttttttttttttttttgagacagagtcttgctctgtcacccaggctggagtgcaatggcatgatcttggctcactacaacctctgccttctgggttcaagcaattctcctgcctcagctgcctgagtagctgggaatataggcactcgccaccacgcccagctaattttttgtatttttagtagagatggggtttcactatgttggccaggctgatctcaaactcctgacctcatgatccacctgccttggtctcccaaagtgctgggggtccaaattcattctttttttttttaatttaatttttctttccctttttttttttttttttttgagacggagtttcgctcttgttgcccaggctggagtgcaatggcgcgatctcggctcaccacaacctctgcctcctaggttcaagctattctcctgcctcagcctcccaagtatgcaccaccatgcctggctaattttgtattttcagtagagatggggtttctccatgttgaggctggtctagaactcctgacctcgggtgatccgcccacctcggcctcccaaagtgctgggattacaggcgtgaaccaccgcgcctggcctccttttttttttttttttggagactaggtcttgtcatgttgcccaggctggtctcgaattcctgggctcaggcaatccttccaccttggcatcccaaagtgctgggattacaggtgtgagccaccatgcctgggtggctataatttttttttaaaggaaaataaatgttgtctaggatgtggagaaattagaaccctcatacatgctgctggggttgtaaaatggtgcaaccactttggaaaagcatttagcagttcttcaaaatattagaattgccatattatcaagcaattccactcccaggtacatactcaagagaatgaaaacatatattcacacaaaggcttatacatgaatgttcataccatcattattataaacaaagcatggtaacaatgaacatgtccaccaactgatggatgggtaaggaaaatgtagtaccttcatacagtgaaatattattcagcaataaaaaagaatgaagcacagatacatacacatatgaaccttaaaaacattctgctacatgaaataagcgagtcacaaaaggctacatattgtatgattcattgatatgaagtatccagaatacacaaatccatagaaacaggaagtagattggtggccaggggctggggaaaggggaatgggaaatgactgctaacaggtgtggggtttctttttggaatgatgataatgttctgaaattgactgtggtgattgttgcactactctgttaatatgctaaaaaccattaaatttgaacttggaaaagaatgaattttgtggtatgtgaattatatctcaaaaaaagttatttaaaaaacaaaccagccaggaacagtgcctcacacttgtagtctcagcaactcaggaggctgaagtgggaggatcactcgagcccaggagttccaggctgcagtgagctaaaatcacgccactatactccagcctgggcaacagagtgagactctgtctcaaaaacaaaaacaaaaggctgtagaagcaaatgaaagggtttaggctatcttgatggtaatagggaatcatcaaacagttttcggaaggacaacaaaatgatccgagttgtgctttggaaagatcactatgggcatcatgtgaggactagatgaaaagaggtcatgatgaggaaaacaattaaagaagaaaatatgggccaggcacggtggctcacgcctgtaattccaacactttgggaggccaaggcgggcagatagcttgagctcatgagttcaagacyagcttgaccaacatagtgaaaccctgtctctacaaaaaaaatacaaaaattggctgggtgaggtggtacatgcctgtagtcccagctacttgggaggttgaggtgggaggatggcttcactccaggaggcagaggttgcagtgagctgagatcccaccactgcactccagcctgggcgatagagccagaccatacctaaaaaaaaaaaaaaggaagaagaaaatatgtataaggtgtcgatttcagtgcctggcatataatagatatttgataaatggcacttcccttttctttctccatggactgagatcatatcagggcactctgccttagacagtgactgaggcctcattctcrtgtctacaggggctgcaagacaacatagctgggtaaagtaggcctggtgtaagaatccagtagcagccaggcatggtggctcatgcctctaatcycagcactttgggaggccaaggcaggcggatcacctgaggtcaggaatttgagaccaacctgaccaacacagagaaaccccgtctctactaaaagtacaaaattagtcaggcatggtggtgcatgcctgtaatcccagctacttgggaggctgaggcaggaaaatctcttgaacccgggaggcggaggttgcagtgagccgagatcacacctttgcactccaccctgggcaacgagagtgaaattctgtctcaaaaaaaaaaaaaggaatccagtagcaaaagtgtcattataactgacagctgaggctcagcctccatgtctgggggatggtggagagtggtaggctcatggcaaactcaggtctgcatgccgtctctgaagctcagcgttactggacaggtgccctgggggaaggtgggtccagcattgcagatctggtcatttgtcaagagaagttggaaatttcaatttttatgttagacctctcaattttctgaatgctggcaactaattcagaatgttatcaacagatggttttaacacaatggccaggtgcagtggctcacacctttaaatcccagtgctttgggaggctgaggtgggaggattgcttgagcccggagttcaagactagcctgggtaacagagtgagaccccccacctctacaaaacaaaaacaaaaacaaaacagaatcatcatcaacaacaaaacaacaaaaaaacactacgagccactgttttgctctgttccggggaggctttctcgagttaacagttttgcctcaggttaccaagtacttgattgggttacaacttcctggaaatcatttttagcttcagaagcactggtcccctaaacggattcctgggacatacccctatctctgtcagtaacactaagcccctttgagcgtgtattactctgcagatggccgaatcgatctgttgttgattctattaactccactttcagaggttggcattttcctcgtactgacccacccaccctatttgaggcttaacattgtttaggacgagccagcagatgatttacaatgagtgttattattcaaaagaaagtcctatatttgctacagactgggtgtggtatcaaaggttggaggggcctggagtttagggtggagttcgggccaggtcctggccaagccctcacatgcgggcaatgtgagttcaagtcatacacaaccaagtgggcatgccatgtcccccagataggcctcctttttgtgtgctgggtcgtgggtttcaccttgaagaaggtgaatggtgagcatagacaatgagggaagttattatggggttggcaggggaaatgcagttaggaaagaaaggaacataggtcaccacatagtcccaggggctctggtgataagttctgagaatgccacccttcctgggccctcttctccttaaaggtaacgccaggaagggagggggtttattgcctgactgagccttactggcctcccatcccccaaaccttcttctctgggacattcttttttccctaaagtggaggccttgccttctgttgaagtgagggttagggcaggggaagacaagaaagtcagcttgataaaacttgctggccaggcatggtggctcatgcctgtaatcccagcactttgggaggccgaggtgggtggatcatctgaggtcaggagtttgagaccagcctggccaacatggcgaaaccccatctctactaaaaataccaaataaattagctgggcatggtggtgggcaactgtaatcccagctactcgggaggctgaggcaggagaatcacttgaacccaggaggcggaggttgcagtgagctgagatcacgccattacacaccagcatgggtgacaggagcaaaactctctctcaaaaaaagcaaaaacaaaaacaaaaaaaaaacaaaaataaaacacaacatgccttaattttccttgggggaagtgaactctacaaggagatcagccttggttaccagaaagcaagatgcttctctgagcataaatgctgctgttgtcctcctccaactccttgcttggattttttgggacaggtgagatgcggaggttaaggggccttgggcttgggtctgatttctggttcactctaggccctggtctcttcataaacactttcctccaaatcttcattccatgccctgccaacctcattctggcctctcacaagctggacaccgtcttacaaaaagctcaaggaattaagattctgtttttgggaaagaggaaaggtgacatcctcaagttaaggaaatgttgcttaagaggatttttggagagttgaataaaagtgaaggggctttctaacaaggaggttaaaaccatggcttttggagtctgaaagggttcaaagtttacctgtcatttactagctgagtgactttgggaagttactttaacttctggaccccattttctcatctggtaaaatggggttacgaatacaggctctgaggattaagaggtgagaagtacaatgaatacttagaacattgcttggtacttagcactgaaaaatgctagccatcgctagttttaccaaagaaaaaaggagaaaagatgatgtggttcctggcaggtgttcggtggctccctgacacccacattctccgcaccctgcccggaacctcctccctccttgtctgcattagtaatccctgcctcctctgcaggagccagctcagcggcccctcctctgagctcccagggcaccttgagttggatttgtctggacattgggttcctgttttacctccaaatccactgctagagctcagtggatgtttgttgaattagtgaataatcccttgcttttgtatgtcacttcagttcataaagctcataggaatacattatctgatttaatcttcagaagcacactgcagggaagatcctgttttatggattaaaaatatacatatatgagagaccggttacctggagtctgcatggttcatgcagattgcgacaacctagaccctgcctgaggtacagctcctgggtcacctcatgcaaccaaaggtgggcgtctcggggaggttcccaccagcgcagggaggtggcttctgagcaacctcactaaagtctccaccaaattgccagcagggcccaggcctttccctgactgtcccagctctctcaatgcaatgaatctgggaaacccaaacatcctgcccctcttaccccatcagacctgcccttccagggatatggctttccctcacccagggaaaaggctgagggggcctcaggctgctgtgggggacatgggtgtcctcctttcttggtgaccagcaatttgactttggccagtgtgaagagtggggctctgatgggggtgtgggaggaggaaatgaagtgggagcacagcccgcccccatcctctttgcagcctctggggttcccctcaggtctgtctggcagctgtcttccccactgacctcttttcctccctctgtgctggccacatccttcctttatcaaaagcagctgctttgggttctcctgaattgccttttaggtgaaaggcatttgtgtttcttggtagctggttcctgctgagtaaggcgggacaggctctggcttcccaggtragactggagaggccaaggcaatccttcactcctggagagctggggaggagcccacaccactggggcaattgagaccccggtcccctcccctcccctcccctccactccactccactcccttcccctctctccatctccaggacccagcagcaaccctttttactccaggtttctcattcatccaaacatttactgagctcctgagtgctaagcacctgagaggagggtctcagtgtcagtgtcacctcctccacgaagctttggagctctccctgggaataagtaagctcttctctggttattatrgttcaaaggaaggtgcacagacggtggtgccactcaaacttgggttttaattccagcgctatttactagctgagagattttatgttatttaacctctctgagccagtctcyccacctatgaaacagggattccagctagcacacagggttggcactggggctaaagggagttctccatgtaaggcaaatgagagacacttggagggcatcagctcaactctccctctccaggagatggaggtgcctagccttcagcatttgtcaagcctggcaccctctttcaccccatcacatccttccatgggggaccacaggcttcagcccattccaagggcctctgttgctcctgctgacgtatccctaggggctccagggcaatygcacactcagccctggtctttgggctgccccctcaccaggtctgggctccttctttrttaggaagcttcagacaggctcaggcaggcaggacatttccactgttgccagccctgccccaggtaggtggggaggagcagatttctcccacccagtggcctcagggcatagttctcccttttctggttaggctactttaggagccctgtgcatgcaaggagcaatattgttatccatgagggctaagaaatggggcagagagaccatccaggctctctgggtcccctacaggcatcatcacttcccttgggtgtggtggtgtctctctggtaggagaaagagcaagaggtggggcagaggtgtggtctggatatgtaatttcagacatctgaccttcaattggaataaggattccaactgtctttatctgtaaaacggaggtaatatcttcacaaggttactgtggcaatcaaatgagactaatgtgtgggagggttcagaactgtaaggcaagaaatccatcacaggacattgcccaatttaaagtccttccatggcttccccatagcttttggggtacaaacatgtttaccacagcctccacccagctcactaacctcatctcccaccatctgacccacatggttcttgaagctgagctcatgcctgctctgggtctcctgcatgcgctacttcccggtccggacttcctccatctaaccaactactcatcatcagctttttaatctttctcagagaagccttccccgactcttcacacaaggccagggctgcttgttacttgccctcttcggaccttcatttttgcacacttacaacgagttgtgtgactgtccaaggtctgcatccgcccacctctgttccctgaatgtgggcttcctgaggataggtactgagcagcatgccgacagtatctccaggctttgcagggcatttagcacacggtagacattttatttgttgaaagaaaaaagcagccgggcgcggtggctcatgcctgtaatcccagaactttgggaggttgaggtgggtggatcatgaggtcaggagtttgagaccagcctgaccaacatggtgaaaccccatctctactaaaaatacaaaaattggcgggcatggtggggcacgcctgtaatcccagctactcaggagcctgaggcaggggaatagcttgaacccggaagacagaggttacagtgagcagagatcatgccactgcactccagactgggggacagagcgagactctgtctcaaaaaaaaggaaaaaaaagaaaagaaaaaggctactgattcagaggcagctccgcccccaggcccccaggctcttcatccactctccttagcctgaaatttgtggcattcacagtcctccccaactccactagactcagcaactgctcttagtccagcagaggaatcaggagctgactttcctccttgctcctccctatcaaaactcaaaattctggtcacttgcaacttccttcttgactccctttcatgagaccagagaacgcatggcctgtttaccatgtcacctcagtttctagtttggggctgttgtgtagatggatcacttgcctattagtaaacctcctgaggatggctcccatccctccctgttaggcaaagagcagagcctctcgaatccaaaggcttgagcacaggtccaagtccagcactgtcccagttgttaaggctttggacagatcaattactgaaccagtttcctcatcagtaaaatagaataccatttcacagaagggtggaaatcaggaggtacacaaattacggtgttcgacactgctaagcactctatctgtgcagcgcaatgtgatagactctacttcattttccatgtagggtaactgaggcatggaggggttacacaggcagctcgctcacaccaccattaaagtagtctgaactcaggcaagctcccccaggagacccaagccctttcctaactgccagacttgctctgttcccttaaagtcaggggcagaaaaggtgctcagcagtttcaggttattttgattcaaatttggctgggtgtggtggctcacgcctgtaatcccagcactttgggaggcagaggtgggtggatcacaaggtcaggagaytgagaccatcctggctaacaaggtgaaaccccgcctctgctaaaaatacaaaaaattagccaggcgtggtggcgggcgcctgtagtcccggctactcaggaggctgaggcaggagaatggcgtgaacccgggaggcggagcttgcagtgagccaagatcgcgccactgcactccagcctgggcgacagagcgagactccgtctcaaaaacaaacaaacaaacaaacaaacaaacaaacaaaaaaacaaattcaccaaggcagctagggaggtttgtttcctggagctcacttggagcttgtagaagtacgtgctgatgtcacaaacakggatgtagaaactttagagattccccttctccctcctgtattaacaagtgaactagctgggcgtggtggctcatgcctgtaatcccagcactttgggaggccgaggcaggcgggtcacaaggtcaggagttcaagaccaccctggccaatatggtgaaaccccatctctactaaaaatataaaaatcagctgggcgtggcggcgggcacctgtaatctcagctacttgggaggctgaggcaggagaatcacttgaacccgggaggtagaggttgcagtgagctgagatcgtaccactgcactccagcctgggtaacagagtgagactcctaaaaaataataataataaaataaaataaaacaaatgaactcccaccttgttcttgcaagggaggacaagaaattacagtgtaatgatgagacaagaagaaattactatgttcaaaagaggtgaaggaacttgagtccctaacactatttcactattacaaattttttttttttttttttctgagacggagtctcgctctgtcgcccaggctggagtgcagtggcgctatctaggctcactgcaagctccgcctcccgggttcacgccattctcctgcctcagcctccgagtagctgggactacaggtgcctgccaccacgcccagctattttttgtatttttagtagagacggggtttcactgtgttagccaggatggtctcaatctcctgacctcatgatccacctgcctcggcctcccaaagtgcagggattacaggtgtgagccaccgcacccagcctgatttcaaatttcttaacctcggcaagttagcaatttttttctttttttttcttttgagacatagtttcactcttgtcgcccaggctggagtgcagtggcccaatcttggctcattgcaacctccacctcccgggttcaagctactctcctgcctcagcctcccaagtagctaggattacaggcatgtgccaccacacccagctaattttctatttttagtagagacggggttttgccacattggccaggctggtttcgaattcctgacctctgataatctgcctgccttggcctcccagagtgctgggattacaggtgtgagccactgtgcctggtcatttcttcattttttaaagctatattttgtttgggctatgaatgtcagaatgaggaacctttttttttttttttttttttgagacggagtttcgttcttgttgcccaggctggagtgcaacggcatgatctcggctcactgcaacctcggcctcccgggttcaagcgattctcttgcctcagcctcccgagtagccgggattacaggcatgtgccaccacgtccggctattttggtattttcagtagagatggggtttctccgtgttggtcaggctggcctcgaactcctgacctcaggtaatccacccgcctcggcttcccaaagtgctgggattataggcatgagccactgtgcccggccgagcaaacttttttaaagctatattttgtttgggccatgaatgtcagatcgaggaacctttcttaaaacatgcaccaacacagttttactgcattcttgtttccttaaatgtctgaggctcctagggcagtggttctcaactctggccgcacattcgcctcacgtaggaagatttttacttacttatttattaattaatttttttttttgagacagagtctcgctctgtcacccaggctggagggcaatggtctgatcactgatcactgcagcctcaacttcccaggctcaagcgatcctcccgcctcagcctcttgagtacctaggactacaggtaagcatcactatgcccagctaattttttatattttgtgtagagatggtatctcactatgtggcccaggctggtctcaaactcctgggcccaagtgattctctcccgccttggcctctcagtgttgggattacaggtgtgagcaactgcaccagcctaggctgatggaaatgttctgaacatgtttaaagaaggctaaactctaatgttcactgggtatattaaattgacttatgatcagtttattaggatgcaaacccatcataagtcgaggagcaactgtatttgttaagagcttcccacgttattctaatgtgcaggcagaacggagaagcgctgacctagaaccggtattctcagtgtggtctcagccagcattagcattgcctgggaacttgttagaaaggaaaataatcaggcctcaccccagatctcctgaaactcaaggggtaggaccggtaatctgagtttacaactcctctagggggttctagtacaggctaaagaactcttatggagtcactcaattttaaagcagaaaataatcaaaaagggtgtcttacctaagtytgtccttttgttctctgggaaaaggagggagagttaaacagcttcccaacatgttcttggcagagtcagacctagaggctgggttttgctccccacatgcagtcccctcctccgttgtcctgtccactcttgcacagccttgtgtcagacagtccacaaaggatacaattcctaccaccctgtacatgcctgttacctttcccatcaagaggcagacttgatttctccctgttagttcactaaggtggctgcagcaaagtgccacagactgggcagcttaaaacaaccaaaatgggccgggagcggtggctcacgcctgtaatcccagcactttgaggccgaggcaggcggatcacgaggtcaggagatcgagaccatcctggttaacaaagtgaaaccccgtctctactaaaaatacaaaaattagccgggcatggtggcgggtgcctgtagttccagctactcgggaggctgaggcaggagaatagtgtgaacccgggaggcggagcttgcagtgagtcgagattgcgccactgcactccagcctgggccacagagtgagactctgtctcaaaaacaaaacaaaacaaaaaaaaacaaccaaaatgtattgtctcatggttctggaggccagaagtctgagatcaaggtgtgggcagggctgtgtttcctctaaaggcactagggaaggatctgttccgggcttctttcctagcacctgctagctgtggcagcataatgccaatcttcacacagcctcctgcctgcctgtgtgtgtatatgttgaaatttctccattataaaggaccccagtcatattggatgaggggcccaccctactccagtaagacctcatcttcattaatcaaatctacaattactttatttccaattaaggtcacattctgagatactgggggttaggagttcaaaattcagtgttgggaagacacaacattgtgtctcccattgaatgtgggccttaaggcctaagtctttttcttgagacagggtctcattttgtcacccgggctggactgcagtggcatgatctcagctcactgcaacctctgcytcctgggctcaagcgatcctcccacctcagcctcccgagtagctgggattacaggcatgcaccactacacctggctaatgttttgtagagacagtgtttcgccatgttggccaggctggtctcaaactcctgagctcaagcaatccacgtgcctcagcctccaaaagtgctaagattacagtcgtgagccactgcttctggccaaggccaaggtcttaagaggcctcacagcttgttttttctctctggaagccaactgccatgtaaagaagtccagctacactgctggagaaaaaagccctgcaggataagggctaaggagaaagcaaggaaggcccccggccgtgccggctgagacgtaagatgtgcgagtgtggccatattgagttcttgagtggccccagtcaactccacagagagggtgcactgccaccaagccctcccacaaactacagaaatgtgagtgaatcaatggcggttgtttgaagccactaagttttggggtagtctgttacatagcaagacataactgcgacacgcctcacacagcacagggccttcgtaatttatgctcgattccttctgttggaagcccttctgtcagaggccaatgcctgcctatcactcagataaaatatttgggtctcactgctagcagagtggctgggaatgaggacaaagttgtgcttgtatttaatgaatggcaccctctgacctacctaaaagcttctgagagcgcgggtgagaagctgggcccctggcgtragcaggggagggagcagagaggtactgaggggcgctttgtgcgggtgggcttacagccagagctcgggcgcacagagccaattgtgtgggctccaggacactggaacctcggggggtaagaggaggaatacaagtagcgagaggccttggctaggggaaaattggaataattaaccattgagaatgagcgtcttcaaaagagcttaattttggggaaatgaagagctacagagaagcacaaagaagtgatyacttagaataggaacagaggattattatatggagaatagagatggaagagaaagtgcttaaatacataaagccccttttcctcccccatgacgggttatggtcccaatcatattgataacagcgaacactgatgaccacttactgtgtcccaggtactattctaagcactgtctatttaatcctcaagatgaccctgagggaggtactactgttctagtctcattttatagatcaggaaacaggccagtaacacgaccaaggccacagagttatgaggtggcaaagctgggattcaaatccaggtattctggcttcagagtctgtgttcttcatcacctgtgctgctctttttctttctttctttttttttgagacacagtcttgctctgtcacccaggctggagtgcagtggcacgatctcggctcactgcaacctccatctcctgggttcaagcgattctcctgcctcagcctcccaggtagctgggattacaggtgcctgccaccatgtcagctaatttttgtatttttagtagagatggggtttcaccatgttggaccaggctggtatcgaactcctcaggtgatctgtccgcctcggcctcccaaagtgctgggattacaggtgtgagccaccgtgcccggcctgctctgtcctttctaaggccagagcactgtctcatcacacctctacagagccttaatctcagcaattagacatggcttgtgctggggctagtaaaatccactccaaggggcccagccctcaggggtggcgactattttgtagtgtgatgctctggaacaagatgaccacacgygcgaggcactgccacagaaaatcctccatgggcctgtccactacttttctgacagcctggatgcagctcctcccagaataggcactcacaaccctttaagaacctgcccagacttgatgagggataaaaaaaatcagactccagatcagcaagacaggatagggtgtgggagggatgcctacacctaagacacccttatcttttttccatttcttcccagttgctgggttccacatagagacatgtggtggtcggggtgggggtggaggttgttcttttttttgagacagagtttcattcttgttgcccaggcttgagtgcaatggcgtgatctcggctccccacaacctctgcctcccaggttcaagcaattctcctgcctcaggctcctgagtagctgggatttcaggcatgcgccaccaccacgcctaattttgtattttcagtagagatggggttcctccatgttggtcaggctggtctcgaactcccgacctcaggtgatctgcccacctcggcctcccaaagtgctgggattacaggcatgagccaccatgcctggccgagggtgttcttaactggaggtttagtccaagtccctgaatttatagacaaagacagcatccagaagaattacttgacaaggtctctacccctccctcaagtgagagagagggtcatctcttttcccagggctgatataccacactgtctttcttcccgaagactgaggactggggaggggtggggaaaggaagcacgtgctgtcagcttccgcattcctcctgtccgcaagggaattccatacagcctccttagctgagtcctgccacatttcttttgagcaggtgttcaagtccccggtgaagccagcatcaacagccccccagcctgctcctcaggctgcccagagtgccccaggaagtacgcagagacagtcccagctcgacaccctgaactttcactaggatttggtttctaactttgttccctctctccctggctaatgagccagcttcactgtgaaggtgccagggatatgagaatcatctacatttattaccatcccttggattctaatcccagacatctaaggctttaagtggtcaccgtctttctcccaccataagctggggctccaattcctatcttcctgcctcccactgggttcaacctagctcagtacccaagtatgcatgggatgggggaccaggactgcgcggcatgtgatgaacacacaccctgccctcaaaggtttacgcgctgggggagtccctctcactctttggcacaaacctttcactttggtcagaagattcctgttccatggacacacagcctacccgtgttgagttttcatctcttttccaccactctgcctttcaccttaagccccagcattagggagcctgttacagttctgagatagtatgctgttccccccgccttgttccttcctggtctgtctggccaactgactcagcctccaaaatccactgccatttaccgcaggtttgccctgcttctggactttagtcacatttctacacatatttgtcatgttatattgtgatttatttagagcttccccttcctaactttgccctcttccaagcttagactcagagggcaagtaggtttcatgctgcgtgtgctggggactctcggccccaacagggctcggaagcaggtgggaaagtgcatgctcctgatggaactgggggctagccttcacctgctttatcttactacttattggtacattgtcttttcagggaaatgaaaaggccttcagtgtgtttggaagatcttgttttagaagaccttattttggctgggtgcagtggctcaggctcgtaatcccagcactttgggaggccgaggcrggtggatcacctgaggtcaggagttcaagaccagcctggccaacatggcgaaaccctgtctttactaaaaatacaaaaattagctgggcatggtggcaggcgcctaaaatcccagctactcsggaggctgaggcaggagaatagcttgaacctgggagcctgaggcagcagtaagctgagatcgtgccattgcactccagcctgggcaacagagcaagcctcagtctcaaaaaagaaaaaaaaaaaaaaaaaagtaaaatgaggtcataagggtagattctaatccaataggacagatggccttataagaggaggcaataaggacagaggccagagatggccatctgcaagccaaggagagaggcctcagaagaaactaacctgccaacacatcttgaccttggacttctagcctcccaaatgtgaggcacatttctgttgtttaagacacctcatctgtggtgctttgttatggcaaccccagcagactaatacaacatctaaaactgaattcttctccaagcctaaatgggaaacatgggagggagaacatctcatgctgtccaagcagcaagtcacccatgacccttctccctgtgtgccatgtcaactggtcactaagcrctgtgacccaacccttttactcttccctcccccatctcactgctctggtccaagcattggtttttcaccttgataactacaacagccactatccctctacggtactgtgcccagaaatctatccttcttgcaactgtcaagcaatcctttaaggcaagatttccttttttttttttttgacacggagtttcgctcttgttccccaggctggagtgcaatggcgcgatctcagctcactgtaacctccacctcctgggttcaagtgattctcctgcctcagcctcctgagtagctgggattacaggcatgtcccaacagggccagctaattttttttttttttttttttttgagacagagtctcgctgtctcgcccaggctggagtgcagtggcgccatctcggctgactgcaagctccgcctcccgggttcatgccattctcctgcctcagcctccccagtagctggaactacaggcacccgccaccacgcccggctaattttttgtatttttagtagagacggggtttcaccatgttagccaggatggtctcgatctcctgacctcgtgatccacctgccttggcctcccaaagtgctggaattataggcatgagccactgtgcccagccatggccagctaatttttttatatttttagtagagacgaggtttctccatgttggtcaggccagtctcgaactcccgacctcaggtgatctgcccacctcggcctcccaaagtgctgggattacaggcatgagtcaccgcgcccggcctaagatttcttaatctcagcagtattgacatttctggcaggataattctttgtggtgtgggcatgtctgttctgtgctttgtaggactgagccacatccctggtctctatatgcgacatgccagatcacccctacccgcagttgcaacagtcaaaaacgtctctaaacattgccaaatgtccgctggagggcaaaagtgtcccaggttgagaaccactgctttaaggatgggttatctctgaatgcaggcacctgaataccactaaacattttatacaggagaaagttcaaatttctttgctccccacaacggccccctaacatctagaataatccatggctcatagtaggtgctcaataaatatttgaaaaagaaacccaaaccaaggtcattcacccctgtacctttttctctagttccttcccctgttccaaagtccagctacaagctagtcgagatcacccaaacataacgtgcttgcgttttccatattttttcctgtaacagtctctgtcttgaaccctgccctgtaccccaactcattgtcagcatctggtgcaagtgccagtcctcctggaaagctcccctcgtcttgcctgaggcttcctgtggcctccagacactgtgcatatgtctcacccactctactgagctttaagcagagggaagacagaaaaagagcagcttcctcactgcaggtgggtgtactagtgcaggacactgaacgcctagaagcagcaagatgagtcacatcacagaatctcagttctgaaggtggggatacagggtagagctgagaatagcacaagtcttcatgagggaaaagttagggcccaagactctgtctttcactttacacaagcagaatacatccaacagaaaacaagtttacaccctgggacagtcaaatctaaaactctggcctcaggtacagcgcagactgtaggcgaggaaccagactgaaagccgggcagaacttactgagagtctgcmctacagagaaaaagaaacagtcaaggtctcctgtcccatctatgcgttcttgggggtcagaaactgttggatttctaatagggaccgggtactttggaggtgccctgtcttctcttaggccacttccccttagttttcagttctgcatcaccaaagtmaccaccctctcctccaaggactccatggagccagctgagcatggggacctgggtcttcgggcagttataaatggaagccaatgggacctgcaggaagtcatctaggtttagatcttgttatgaccaagactgggactagagtctatctgtcgcatcctccagtaacaacatccgtgagaaagccggcccaggaaaggcaatgcttacccatgctcatgcttcaagtagaatagagctgaccattgcacaatatgggtttgagaggcataggtccacttagaagtggctttttcaataaaaattgcattgagtgtgcctgccttccctttcacctcttcaaccctcttttgcctctgccacccctgagatagcaacaactcctcctcttcctcctcaaggtaaagatgaggatgaagacctttataatgatccatttccacttaacgaacagtaaatacactttctcttccttatgatttttctctagcttactttcttataagaatgtgatatataatacattactaatgtgttaattggttgtttatattattggtaaggcttccagtgaatggtaggttattagttaagttttggggcagacaaaagttatacgtggatttctgactgcacagggtcagcaccccaacccctgtgttgttcaagggtcaactgtgcttgttaagactccaagagtctctcagtttcaggtcacaaccccaaggcaagaatttctcttctccatcctcaccctatcagaggttccatagtttgaaaggaacccaggaaaggctctcccaagggactgggccctatctggggcttggaggtggggaggtgggagttaaggtcaggcaaagactgaacaaaaacccttcctgtttatttcaaaagtacaaaaagagggatgggtcatagatgagaacatgacttaccttccattctacctgggtgccaggagaagaggtatggcagctgctaggttatccaaataaatcatcgagcttgctacccccagctttaactgactcattctatctggtatctcatcacaggagagtgctcagggctaggagtccaaccctcactggatgttcaccttcctgtggcctggggtatgtgctcagggaggggtggtctctctgcatgatggattgaactgctaatatgtatgaatccatgggcccagtgagaggaagagaaggaaagaaaacatcagctcactggtttccgggtgaagataccggcagagcagaccaggggcacctgccaaacatcaacagatccagatccgttaataggcactttaattaattaattwatttatttatttatttattttttggagacagagttttgctcttgttgcccaagctggagtgcaatggtgcaatctcggctcactgcaacctccgcctcctgggttcaagcgattctcctgcctcagcctcctgagtagctgagattacaggcatgcgccaccacgcccggctaatgtttcgtatttttagtagagacaaggtttcaccatgttggccaggctggtctcgaactcctgacctcaggtgatccacccgcctcggcctcccaaagtgctgggattacaggtgtgagccaccaggcccggcaacagacactttaatagagcaggtttctccaacctctttcccttccttctgtgcccttattccacctctacccagtactagaggaaccagtaggttagcagtctcctaggaacagctttggagaaagactctggagtaaaatagaaaaaatcaaccgctatagcaagggagacttgtcttgcttacacgaaagaaagggggcacaagtaaggatacacacccatgtcagagccacgctattagcgaattaagacaaatgacacagtaggttgaggcccttgtcttttggggactatggggactgagggaaagggggaatacagccaagcagaagactgtcagacctctctgctcagaaatgcaaatacagaggaagatgctaaaaaaaggaagaggcccaacatgtggggaccaaccagcacacaaggccacagcccctctggacctaagcatgcagttccatggtaggggcagtctgtgaccctgggcactatgctgtaggctctgggattccctccttttggcaaataccctcccagggatcaaggagcaaggctcacagatgctgggaataagtctctagattaacgctagtaaccagtttcctgaagccaaagcaaggccacagatgacatttaggcagccccaaggctcactggtgcttaagagagcaaacacgtgctagaattaagtgtccaaaaaccagagtaggtagttccaggccaagagtatgggtggccctcgcctttctggcaggggctgggttaggttctgctcagtggccttgccaggaacaaagcctggctccatggagattctctgtggtttaagaatacataagcttgcaacctctcctggctgaggggactttaagcacattatttaaaagcagcctggccaggcgaggtggttcatgcctgtgatccttgcactttgggaggctgaggtgggcggatcacctgagatcaggggtgtgagaccagcctggccaacatagtgaaacctcatctctactacaaatacaaaaattagccagggatggtggcgcatgcctgtaatcccagctattcaggaggctgaggcagaagaattgcttgaacctggaaggcagaggttgcagtgagctgagatcacgccactgcatgccagcccgggagagagagtgagactctgtctcacaaaaaaaaaaaaaaaaaaaaatagctgggcacagtggctcacgcctgtaatcctagcactttgggagggtgaggagggcagattgcctgacctcaggagttcgagaccagcctgggcaacatggtgaaaccctgtctccactaaaatacaaaaaattagccaggagtggcagtgtgcacccatagtcccagctactcaggaggctgaggtaggagaatcgcttgaacccagaaggcggaggttgcagtgagctgagatcgtgccactgcactccagcctgggcgacagagtgagactccgtctccaaaaaaataaataataataaaataataataaaagcagcctccttgaacctggactgttccagaaggggccatttgtttagtcattagcttctgccagaaccttttactaataaattgatctctgacaccacatgtgagcagatatgcctaagcctctaaaacaacagttcctaatttcctcattaggaactccgttgagaataagagatacggatcttcttgcctaaaagtctcataggcacttttaagatttacttcatagccaggcatgaggtagtgcctgtaggccaccacatggggaggctgaggcaggaggatggcttgagcccaggagtccaaggctgtagcatgctgtgaccacatctgtgagaataaccactacattccagcgcatgcaacacagcgagaccctgtcccttaaagtaagttgtttcgtatcttcatagtcccaggctggagaccactgttttttttggaatcctatttcttggaccctgcgtttgtaaggcatcaggacagagccctcaagtctaagatggctgctgcggagaggcctgtgaaggcaacctctactgccctctcttggccatcaggcgggaggagtggttagacgtgcttgattccttgtggcactgaagtcctgcagtttctgccccggaatgctgggggcagataaacttttggcagctttcattagaatctctagaaagcttactcttcctcgaactgggctggagacaagggggtacacatagggacccctgtgaagttgaagtaccacagcctgggtgctgaaccggcgaaggcgtgtcagggtggtccgctcacacaggagggaagcagtgccaatcctccactagacatgccctggctggaggccctagcagcagaggccaccctgccctttaacttagaaagacattaaaggaagctgagaagcttaaagatggcccactgcctgggcagaattccacagagttccacatcgcttgcaatatccattgtatttgtagggggtcagggaacagtggaatgagatacacacacaactgtggtgcgagagaccaggtgttacaggtgccaggacccctagaactcctcatgctcatcctcgctgtccaaagattctgtgcctacttcataatccttctccagggcagccaggtcctctcaggcccagagagctcaccttcctccatgcccctgtccacataacagtgcataaatgcccgcttggcatacatcaggtcaaacttttggttgaggcgggcccaggcctcagtgatggctgtggtattgtttagcacgcagactgcccgctgcaccttggctacagcacccccgggcaccactgtgggggactggtagttgatgccaacctaagaaaaaacaaagaagtataagcgcctggttctgtgtttcctggaagggtctgtacagggatccctggaactagggaaggggcatttgtcaacttgtaagaaacaaagaggaagatgatcaccaccacaaggaaacaaacaagtctagaatgagggagcttctgcaagacaagactagtgccttcaaagtcagtcaagaaaaagggggccggatgcggtggctcacgcctgtaatcccagcactttgggaggccgaggcgggtggatcacctgaggtcatgagtttgagaccagcctagccaacatggtgaaaccctgtctctactaaaaatacaaaaaatagccgggtgtggtggcgggcgcctatagtcccagctactcgggaggctggggcaggagaattgcttaaacccaggaggcggaggttgcagtgagctgagatcacgccactgcactccagcctgggtgacagagtgaagctccgtctcaaaacaacaacaacaacaaaacaaaacaaaaaacagggtctcgctctgttgctgaggctggagaggggggtgcaatcatagctcactgcagcctaaacctcctggacccaggtgatcctcccacctcagccttctgagtagctagaactataagtacacactagcaagactggctaattttttaaaatattttgtacagatggagtctcacattgcccaggctggtctcaaactcctgggctcaagccatcctcccacctctgcctcccaaagtgctggattacaggcctgaatcactgcacccagcccagaatatataatacattttagtgtttctcatcctcaaaaaaaaaaaaaaaaaaaaaaagtcaacttcccattagtgtctctagggacaacaagctgaccatgtcctaaaggcagcctattcttcccttaagcagctaaagatcttcctaatatggaggcagaaacagtctgtttcccagatagcctacccctcatttccatttctgagctacaggacaactcttccacactagcaagcagctattattcctgcctgtcctcctgttgtggtcatgtccacagcagtgtcatggggcaggaaagctatatatgttttctttttttatttttatttttttgagacggagtcttgctctgttgcccaggctggagtgcagtggcgcgatgttggctcactgcaagctccgcctcccgggttcacgccattctcctgcctcagcctccccaacagctgggactacaggggcatgccgccatgcccagctaattttttttgtatttttagtagagacggggtttcaccgtgtcagccaggatggtctcgatcatctcctgaccttgtgatccggacacctcggcctcccaaagtgagccactgcgcccagccgctatatatgttttctaatgccacagctgccatctttaatctttctggagtcttatcccacaacaaaacccaaaaaacaaactaggtcatatgcccagcaccctgggaaggtcaactgataacagggtggggcataaatgcgtgcttcttccttattaccgcaaaaggaagagaacgcatccagacgcagaacacaagaagcctctga

SEQ ID NO: 94019 - DNA, 14592 bp, Homo sapiens
  misc_feature (1)...(14592): n = A,T,C or G
aggggtcgtatccgtagacatgttttatgtagtttaatatagaaaagcataaaacataaaatagagtatatcattatttttctgttagtaatctcttgtagtagcaaaataatgataccagaagaaagtgtgccagggacaaatgaagcatagttatctatgcttcatcagggaaatccctgagggcaacatcactgattgcccagagtagtttctaatgtggctgactgaattcttcttcagacatatctctaatataggcttttagtggctgccttgaattcattcaagttaccacttaagatgaagtataatctacatccacattcaatgcacattttttcctcaatcaaaagcattaagaaacacaatgatattgtaattttgatttcagttatcaatttggaacactgttaactggaatttccattaaggaaattctagtatttcatgtaatttttgttctgaaacatacttagagaccaacatatgttagaccaaattacagttaatttttatgatagatttcttcaaatccaaatgttaacttagaaggcagtcttcatctccaatacaagagaagatgcacatttgtaataaaaagtataattaattctatgttcacagttattgcaaattaatcaagatatttataaagaaaaagtagatatacatttctttatgggatattgtttcagaatttattagttaatgtagaatagcaaaaataatatattttatgtgatgacatgtaagaaatagttaaaggccaggtttgttcagatttaaactcagtcacagtgatgtcttccagttatttgtgtacattattttttatgtgaaatggtattaaaaataaaagtgagcatctttcaggtaaccattattattattccagtgactattattcctgtcctagtgatatctgataaatatggaaaacaatagtttttctaaaagaaatgtgttaccttactatatcataaatttctcagtagatttaccagagtcaacaattatttcttatttttccacagtgttaagtgcaatatctaatatgttggaggaaccccagatatatttttgaaattaataaattgataaatgtttagagattaggaatatttttaacttgattatttttgtttgttttctaatttagaaaggaaaggctctgaaatatttttagatgtttcatcaaataaattttaaaatcacttaataatggcaaaaggcattacattttactatgtggactaaaaaaatctgtgcttttaaactatatttatcataaaagtagcatattttgaatttgatatttgctaacctggatggtaaaaactttaacaaagtatttctcttaaatatagtaaatgaagtggcattattgagtcattcttagacaaggggactgtaatttctggaagttaatttgtccacaatcaaatacttagaaattggaggagttgatccgaaactacattaaaaaatttaagactgcacttttcattgtacacttaaaatattgcaataagaattcaaatgtgaaattaccaaaattttgtgttatttgaagttagaaaactcaggtaaacctatgatcaataattttaattagatttgcttatgtcctccaactcagcaccttaaattaacaaggacaaagagtagttctatgatgtataatctataatggatacagatcattaatgtgcactccacaaaatagcaactggacaagagggtgaagaagagatgaatggattgagtagactaattagcaagctgaagtgtaagagttactagcagcaataatgtggtaggaaagacactgcaagcaatgtaggataaataatgactataattgtaataaaaataacaagtattctgggaaacaagtgctactgcagtctgatttaagtaaatttctttgactgttactagatttacttttgaaggtgcaaatcaaaataaaattaaggcaaaatttgactacatcacacaaagtgggaaccgtttatgacaaaggcattgttgcagttcatttgtatttattctcatcactgattttcttataaaaaaattctgtttaaataccaccaaaaacacatagtaatgctaaacaccttacattaagagctagatttatgaaaccagatgtttttgaaaatttgtagtgaaattgagtaattagatgttggttgtttttataatctcactataagtttaatgtacgtatttatgtacgtaattgtgtgtgcataatatatttgcaattatataaggttgaaattattataaagaataatttgacctacgtaaatggatattccatattgcctacatttcaatgtatttccaattaaaataaatttctataagaaaatgaaagattgtcaataaaagactagacccccaaaattagtaatgtatattttgtcaaaatgtgatatagttcttaaacaattaagactattgatatttacaaatattttttagtgggcatcagtgtcttatgtgtttgacaccaataataaatatttgaaactgtaactttggtgacatttaatgttttgtgtaggattttagcagcagctaaaaaatcaactgaaagaactgtaatagaaatggagataaaaaacagagttaaagttaaacaatatttaagtgaatcacaacaaaatatatcacttcataagatgcatattcattgttacatattgctaaatctcaaaagtcttaaacaagttatttacaaagggaatcacataaaatatacaaatacatgtaccycttagaagtttgttcagctataaaatgagcagcagatttcaatttcctccactgtcatcccatgaaaaatgagttttattgtaagtgttgtaaaccttagcttaccaatttaaaatgcatgtttatttggctgtctcagaatataaagtacccatacttcaaaatcccatttaaaaataataataaagtagtatatccagattcattcccaagttcaacaacttggaattcagtatttaataaatctatgaattcctagcactgtgctagtttctgataataacattgtattagtttcaagttgtattagtctcaatatttgaaactttatgcttaaatgttcatttaaaaatgaaatatttaagattattagcatgcacaataagtagaatttgattacaatttaatcttagctctttgactactattgtagtaaaaaagacattctgtactactaataaaagtgtagcaatagatacaagttcatacatttatttttgtattaatacctatagatatgtattggtaagtaatcccttattttttgtattttaatgaaaacagaaaacataatatttattcttaatttttacagaaaaaagggaatttacatattgaatatcctaggtaaattttatattaataaaacaaaaattttaatatatcaataaacatatttgggtagtattgcctcctacttacttaaatatgtatttatatgatttatattttccattatgtttttataacattatgcatatattaatgttttattttgtaatgtatttacagaacactgtcttatatacaaagtattttaacactaattttttcatttgatacttaaaatagtcttgtgatttggacagtactggtacaattatcgcagttttacaactggtacagataacttggccaaggtcatttagccactaagagtcaattagttcaaatatctagtaggtgattgaactaaaattaaagttcatagtttttattttatagcgaataattattttaaataaaggactcagccactctaaaataatgcatggattggttttgtaccattgtattagaacaaagaaaatacatctctgtattctctgcaaagattcaacaaaacaggtttgtcctttcctttgtttttctttttagggaagtgtagtggatttattctttttgtttgtttgatttttgttctatcaataaatgagcatctaaaacttttattggaagagccatagtgttaatggttgaatttccccagtatcagatcaattagacatgcatagatttaaagcaaagcttggaacaatgttcgcatgtgacccatatgtttctacacatttgctaaagaggtttgaaaattggtaaaaaagatattctataaataaaagttaatatttttcaaaccgatattagctggcattgcactgatggctatggagccattgttctcaaacttttttgttccaaggaatcgaaagacattttgatcaggagggttttatccagtaatgtgataaatatttaacaacaggctctcggggaagaaatgggtgaacaaaccttatttgctgtatttactgattgttgtgatgtcaatacttctaccattttcaatgtcagactaccaatgtgatatcactgaacaaacaattggaaagacatgtgcacaattagatctcacaagcccaggaaagctagttccagcacaccactggttatatctatggatatttaccataaaataaattaaatcaaaatgtttaaaaataattataaatgaattcattttaaaataacaataatctatctattaacaaaagtaacatgatcttggtaaaaaataatattttccaaacaacaacaaaaaatgttatagggagaactgcccttgttttacatattctcaaattactttaatatacaacttaatagaagactgctggatcttcatatctgagaaagcattcaatctggtgtaaaatcactttaagcgtccactttaaaaagtgtccactgcactatagatctgtgacagatagaaacaaaaaaaagagaacatcttagtattacgaagatatttgatctcacagacccacagaataggttttgaggactcactggaatccttgcatcacactttgaaaaaatgctactaaagagaaatagttggaaccaaaaaatggcctatgttgaaattatctgaataaaaggaaagcaagtcaccatgactgtgatttttcttctctgagaaaaacaggtggtagcattccaggacttttctgtagttcagctaaagacagggtccttgtcacacggccacgagaaattaggcttgcagacaatttgaagggtgagtaaagcagggttttattgggtgaaaaggaagaaaagaggaaacagagactgttagtaaagcgagagtatgtgtttctctgccagtgggtttccagcctcacagattgaattccaagttccacccaagaaaaggacgggccaggatcctccccactgcaaaggatgtaaagttctgtggctccaccccaatgtgaactcttctcagtgcgcaggctggttggagtttctctgggaacctcttcccacctggctgtctcagtaggggagagagagagacagagaaaccatgaggcactatactaatggtatagtttatagatcgtaaaattcaccgggcaatctgtgatcttctgagcaaggtccagacaaagtgaggagccgaaacaaatcgagattttaaaatatatgaatttattaatattgtcctacttttctgtgcctcccacatttgtaggaggtatactgatgatcatctatatatgtagaaagtcctatggaatctacaaaaaagttattaaaacgattgtttgcgttttgcaaagttgcagtcaattgggtcaatataaaaattcaattgtatttctatacgttagaaattaagaatcaaattgaaaattttaaatgtacggtattataaagcattcaaataattagggacaaatctgaggaaagatgtgcattctctgtgtactgaaacactggaatattgctgaaacaaatgttaaatgatctaaatatatggggatagatactgtgtttattgtttgggagattcaataatgttaagaattcagttctctgaaaattggtctctgtattcaacacaatctgaaaataagtttcagaatcggtagacattgcgaaccaggttatgaagtgcaaggctgcagttgcttgggaggctggaaagcctctctccatagaggagatagaggtggcacccccaaaggctcatgaagttcgaatcaagatcattgccactgcggtttgccacaccgacgcctataccctgaggggagctgatcctgagggttgttttccagtgatcttgggacatgaaggtrccggaattgaggaaagtgttggcgagggagttactaagctgaaggcgggtgacactgtcatcccactttacatcccacagtgtggagaatgcaaattttgtctatatcctaaaactaacctttgccagaagataagagtcactcaagggaaaggattaatgccagatggtaccagcagatttacttgcaaaggaaagacaattttgcgttacatgggaaccagyacattttctgaatacacagttgtagctgatatctctgttgctwaaatagatcctttagcacctttggataaactctgccttctaggttgtggcatttcagctggtgatgntgctgctgtgaacactgccaaggtggarcctggctctgtttgtgccgtctttggtctggsaggagttggattggcagttatcangggctgtaaagtggctggtgcatcccggrtcattggtgtggacatcaataaagataaatttgcaagggccaaagagttnggagccrctgaatgtattaaccctcagggttttagtaaacccatccaggaagggctcattgagaygacygatggaggagtggactattcctttgaatgtattggtaatgtgaaggtcatgagagcagcacttgaggcttatcacaagggctggggagtcagcgtggtggttggagtagctgcttcaggtgaagaaattgccactcgtccattccagmtggtaacaggtcgcacatdgraaggaactgcctttggaggatggaagagtgtagaaagtgtcccaaagttggtgtctgaatataygtccaaaaaaataaaagttgatgartttgtgactcacaatctgtcttttgrtgaaattaacaaagcctttcaactgatrcattctggaaagagcattcgaactgttgtaaagatttaattcaaaagagwaaaataatgtccawcctgtcgtgatgtgatgggrgcagcttaacaggcagggagaagcgcctccaaactcacagcctcgtagagcttcgcagctaccccagagaatagtgttatgagtgtaattcatgaatctctataatcaacgacaaggataattcagtcatggacctgttttctggacgctcctccacataaataattgctagcttattaaggaatattttaacataataaaagtaatttctayatttgtgtagaaattgtctttgttttatgctgtaatcattgtcatggtttgtctgcccattatcttcattctgtaagggaaatgtaaaggaagcagggcagtggtgggtgtctgaaacctcagaaacattcgttgaagttttaagggtctcagtcccgttgattgaagaacagatcctagccatcagtgacaaagttaatcaggagccaagtctgcttctgtgatattatcttkaagggaggtactgtgccttgttcgtgcctgtaccccaaattcctagtatggcatctgcccctcaggggacactaaaatgtattattgaaacagcattctggacttaaatagktgtatgtgtgtgttggttgtggctgtactatttctagtatagtgaattacatactgaatatccaagttctcagcacctacttttgtcaaatcttaacattttgccacttccacatcacattgccattcctcccctccagaggtaacaattatccaaaatttgatgtttgtcattcctgtgttgttgtactttcactgkgtataacckaaaccatctactctttagtactgttttatatatttttaagccttatacttgctcattctacagcttttctttttttcactcattattgtataattatatgtgaagctttcattcattaattttagtactgtgtagcagtattcaattacgcgaactatcttaattcatctgttctccagttgaaggcatgaagttgttgccagtttctgtattacaacactgtagtggaacattcttctgcattgggctcactacrttagttacttaagatgtgtatcacagaataaacacatttagccttatagacattgccaaatttatcttcaaagtaaatgtgagtttttgtgaattacgtragtgtagaatggtgttttattatgagtttagtttgcattttccacaattactcattaaatccttcattctaatgkacattttattgtgaagaacctgttcatatcctgtgcccaactttgtattgaattatttctttttctctgagtaatttttaggagttcttttattctagacatcaatcatttgtcagttttatatgttgcaaatatcttctagtctatctagtgacttttctttttactttatggtattttgttgaataaagttttaatgtagtcaaataaagaaaataagtttcagcagttttttttttttgtagaaattgacaagctgattcaaatattgatatggaaatgcaaggactaagaataccaaaacaactttgaaattgaacaacaaatttaaatgacttatgctttctaattccaagaaaaattagtttcaataaaactacactaattaagactgtgatatttacataaagattagattaatgaccagcagagcagaattgagagtccaggaatagacccaaaaatgtatggtcaattgcttctatggggtttataaagaatagcactcctgacctggaataatttattttcacctcatcatgattagcaacccataccacaagaactcacactctgatggctgaagaaatttatattgagtacagaccagaaaaagccattcatcttttctctatttctcttgaagcactcttcttagaaatgcagtctccaggtaacaagtctgatggctctgaaatgtccatactggagaggccatacctcggtgcttccgtaaatagcaccagctgaactctcagctgacagccaatataaacagtcaggcaagtgtgagagccatcttggatgccctaacstgttgaattttcaccatagctaacatctgactttaaattgtgtaagagactttgagaacttccagtcaatctcactaaatccttgtcccacaaaatgatgaacaaaataagatgctcgttttaaacatctaagctttaatgtaatttgcaatctagcaaaaggtaactggaacatagccttaccataacatgctccagaattatcctaatatgtactcatcatctgccttctattttactcatttcccctttaaaattggaatttttatagctctatcatttgtcgattaactgtcttctctaccattcatttttctttcttccaaaatcttatgcctatatgttttttaagtaccatgtagataagttattttcaagatatgcctttctcttgtttggtacatgtatcaggttactatggaacagtctttaaaattcctggaagctcttttgcctagtttagaaggtctgcaagttaacccccactaaatctttcaaaaatatttttaaagaacttatagccactcccttgatttaattttatctcataatttcttactttaaggatatttgcttttgaaagaatggagatgaaaaatttttaatctccatgtagacaaactctggatcttctatatttcctctaaattctgcttgcagactgttttctttcactcatgtctttcttcccatacaatgtttcaatattttgctgagaaatagccttaacaatatctacatgtccattagattttttccatcttccatgttaccaatagggtacaattttcgaattgttttgctatttcatatgagacatcatattttaagcctgtttagatgtttcctcactactttttcacgtttactaacaaagttctcatcatttttcagtcttcttagagttcccaaattgttttttcatcctgttccagccaccatgtcaaatcatatgccattatgttttagaatttttggttatgtagtacccaacttccaatttctgtatcagttaacttatcctgcaaaacaagatattctaactttaagcaagttaaagcatacaaatttattatttcttcatgattctgtatattgttctggcagtttttcagttctggtccaggtaagctgaagctggagggtctaaggtacctcagtgtctgtggagattaggaactgtaatgtctgagaagactaagggcctctctcattcttctagcccagtcttgttcatgtgatgaatgaagagttttcattatcaacagaagccaagtaccagtgcaaaggaacatttcaagtccctgtgtgcatcatatttgctatctctcattgccaaaatcaagacaaaggccaatgccatgaagaatgactctgaaacatccatgctggagaggacatacctaggtgctgccatagacaacaccagctgaactctcagctgacagccaacataaacagcccaatgtaaacatgaagaatggcattggcctttgaagaccagtggtgatgaagaatcagacttctctttaaatggaaagtcagtcaaagtcatattatatagaaactctattgagtaaacacgtcccaccccaaatgcatatgttgaaacctaattcccagtatgaggtactgggggagtgaggcctttgggagtagattgggtcatgagggcttttattaatgggattagtgccctttacaaaagtaatctcagaaagctcatttactccttccttgtgtgaggacacaaagaaaagtcagccatctgtataccagaaaatggtccacaaagactccaaatctgccagcatcttgttcttgagacttcctcaactccattactatgagaaacaaatttctgttgtttgtagtccatttggtttgtggtgttctgtcattgcagcctgaatgaactataaaaagggtcatagagagaggcatgaacaaattggtagtcactactgaaataatgtaatagttgaaatagttagatcatattaaattgggtcatctttggacatttatataaatgagaataaacttgtttgctgagcagctaataaatcaaatgcagtggaccactattaaagggtttgcaaagactatgcacttctttttaaaagaattccagaagccatttatgcatttaatgtgacacaaattttaaattttattgacctaactgcagatgaataggtaagtttaaatataggtgtaaccaatcatattttcttgctctacaatttgtgagacacacagagaactaatataaactaagttagatcaatgttagatagataaataaaggttatagaattgcatctgccttttttcttcacttcttgatttgctgctgatcaatattttatatttctttgaaaaactccagtgttctttcataaatttgccctcaacttaatgtatatgtgtatgttcaggtgattagaatggtttgcaatattgttctgaagcttacagtcaagagtattattcaaggcaatgacttcagttaggatccagagagtggtatatctgattctgaaacctgtaccctctccactgaatcatgctgcctcatcgttttgtaatggcttttaggggaattgaacttactctgctctgcctttctcctaggctttgtttctgaggagagagatgcaagcagaattacggaagactgttagggcagataaactgattgtaatatttgataaagaaacgatggatcagaatttatggtcttgctcttacaagtttgctactacctatttttttttttttgaatctttgctttctaacaagtagcctctactatgacactcacaactttgtttctttccatacaaagactcttcatcatacttattaaagtttgttttattagtattattatgctttaaagttatgcagttcttttttctttccctgtaagttgctacattctatgaaagtccaagaaggaaatatactgggaaagcttgttaagggaataagagaatagccatttaaattcaattagctgatgatagtatctagaaagtttactgggtatacttttcaaagatatttgaccaggaaccagttttcaaaggtacaaaaattctagttatctttagaaaacaccagggcagctaacccagggtgggatacagtgttactgctacaacttcaccaggccacgggtaatacaataaaaattaaatctctttccctgaaaatggatacaatttgcaaaagttcttactcaactctttatataaaacatatattaattaccattttctttcattaagaagaaagtaaaggcctcaacatagtacaatagcaattaattctagcaatgaaaatgtttaaattcatgactctaccctgtttttataatctttagagtattgtcatacagaatatttttcagcctgaaaatattactgaatgagtgtttctgccatgggatgatgtattgaactcatttctgcagccttaacaacaacgcctagcactgagagttgtatatctcatcaagaatcccctttcaacaatcccatgtagcacttgctccaattatygtaatcgataatgtcacaaagtgaataattccaaaagtcaagatggctttttgacatatcaatgtccaaaacatatcaatagctcaacagtaaatatttattgaatatgtactctatgttagaagagtacatcagcattatctaagataaatactgtaaaaaacaaaaacagggtgtggtataaaatacacacgtttgaaactaccccagacctactaggcaaacttgtggaatcatatcccagcatagctttcaatctttgtcttctgaattcagaaattttactgcatttttctctccttcattcgtgaaatagggatagaagcaatccttctcctcatatgcattgtaaagctcacagtgtagaagtcaawggttagctttgttactatcgtgttcttcaaaagcatcatcatgatcatcatcaacaatcttatgtttcacaagtactggaaatcttaatatcactttgcttctaacaaattcttttctctttatttttacacaaattaaaatgaagcattttctttttaaaaaccaattcattacattgtatggatgtttatttctattacaaatatcaacatatatatcagaaacaatccattcaaataacagagtaatacatgaaggaagtatagtccttagaacatagaaaactctggaggaaattactgagatattatttgtacttaaaaacatataaatcaaatttctgaaaggcatagataatattgaaatttattatttaatatttgtaaaaacttaaactcatacattttggtaaaactacatatattttttatgaataatacaggaatctatgtggaaatttccatatctacttcctcagattccctgtgaggcaagaatcagtacactattaaacaattcattcactcaaactaatgaaccttcatttctcaggacaattggaacactgtcaggtggcttattttaaaataatcgtaaaagtactcagtaggtttagaaataattaaaatgactgtattgttcctatgttacagtataatgggttgttagaggagcccagaggattagagattgatattggaagactttaattagttttttcaaattggaaaaaatgtacatgtataaaaatttatttttctgttaaaatattgtttgtgatgtatagcttataacgtatttcaatacaattatttgagattgtgaaaaattaaagatcttaccttatattaaattacaaaaactcctttctcaaattattttgtgtatgaaatactatatacagaattaatttgaatcaatttagtacactaatgatgtcattttgattttgaaatagttttcttctcattcctctgaatcaaataaattcaatattgagtacaccattaaatgcaataaacccaacatgaactccttctaaatatttgggaatggatttcacataaatttattatataaatgatgaggcctttgtgaatcaggaattgttcctgacgctgtataccaccatgcagaagacatataacagatgatcacagaaacatgtaatggaggacaccaggcaggatataggaaaatatagcagggatatcttagttgtcaggtgatacaagaattgtagtgatactacagaatttaaacttttaagaatgtttaataaaacaatgattctgaatattctttttaaaacttctttattttaaaataatgttaaagttacagaatactagaaatggtaagagagtttcaaatatgtttcactcagctttccttaatgttaaaattttacataactataataatatatataactataataagcaaaatg

SEQ ID NO: 94020 - DNA, 24431 bp, Homo sapiens
acgtaggagtgaggtacctgtatatcctagaattacacaaatgaattaccaacaattaaatggcaacttttaaaattgtattttaaacatcaagtaaccagagatggaaaaatcttcctataccctcttcagattaccctgtacattattttgatggacgaaaacggatgatcttgagcactatttcatggatgggaggaaaaaatccatttttggggattgcttacatcgctgttggatccatctccttccttctgggagttgtactgctagtaattaatcataaatatagaaacagtagtaatacagctgacattaccatttaattttatattatgaaagcaaatcatctgcatgtgcatcaaggccagtcctattcaacctagctttcgaatgctgatatctggttagtatgtcattttgaagttggcacataacttttctaaaaaaaagcagtctttgttgtttgcttcttccctacggatgacttctaaaaatatatgacgggtataaaaaaattagctatattgatcatatcaacactgtaactgctgaaatggcattctaatgtttgctttttattcggacaggccacatgatgcatagagcctctttcatgtgacttgtgtctactgcttaaatctttatgctgtgttgatgatattatattgacatatgaagctgtatatgtgtatgtattttgtggagaaagggattacaagatgtatgagtataatgacttgctaacctttcaggattcagagaaagatgaagaaagaccatatctaaataatacacttcatcattttcatgtgtataaatgcttaaagtaccatctttgttgaggtggttcatgtatccagtttatccagtacagttatttgtcaagcttagctttgatttcaaaggacacgcttaccttgtctggcataagaattaatgctcatgtctgcagtggttgggtaggtcctgcttaggagaattaaaaaattcctctttccgtttggttgaatgttgcagtcaggaaccccaactcacttggaatgtttttatatgtaatcatttcccttgaagcttatactttataagggaagaaagaattcaggtgatatgggaaaactgcttggcagaccttcatcttctgcctcaactgtaaaccacatgtaaatgcttaatggagactgttttcattcttgtgatatttaacattcagaaaattacttcagctttggaaatactcaggctgtttttattctgcaggtaagtgttttgacttaagtactaatattccagaaatttttgaaagcagtaaccttaatttcctatgtatttcattccacttttgcatataggtcaaatagcaatgtgtatgcacattctctttagttaaggcaccaattgttttggttggttttcctaagacatactttaaaaagatgttctataaatttcctarttaaattatggggattttggagtatgtacatgataaattataataygtatatggttgaagttattttattttttactaatgaattattttaatattccttattgaataaatgctgtaacttgtttgctatggaacttattcttaaagttctagttaaaaataatttttccacatgcatgaaaatatgtattaatcagaggtggcttaattacattgaaattgcttttttgttgttgtttttttactgaaataactcatgtttgtgtagaagaatgcctgtttactcagagtttatattttccttcagttatattttaaatcaaaaggtctgggtaatgtatacttttgattaatatatactttttttaaaaaacaaaaaacaatgtaatggttaatagtagaaatgtgccacacttttcaagttttatataacatatgaaattcagttaaaagaatgtgtgtttcataatgacttttaactggtaaaaatattacttgcacgaagtacttgatgtatggttatcctgaaatttcggagtatttggtgtgttctttgtctaaaaatagtctgttttgtcagtccttcagaatattatttattctgaagattgtccctcttgcacttggcagtttattttcggggatacattgttgggggagaggggtttctgccactctttccagattgagtctgtgctgtttaaggaggactaccatcctgcaactctttttctaattggggcacagaggatgtcgctaaagaaaagttgaagagccctttcagcactttctcatctgtggagaagatggaatcttaaaatacatttggagttttatctgttttacaagtccattgatggcctaagttcctcctgttttctgctgtttgatctctaaggaactcctgttgctaaatatgaagagtatggaacattcatatagtctctgtgaagcatggggggagggaagacatttctttttcttataggctttatgctcaaatgtcatagtctcctttcaaagaattgtgttgcattttaaatgcacccagcttaagtagaagacattgaaggatgcattaattttcaggaactattttgaattatgaaaagattcccaattgaaaaaattattcaacaagtaaaagctaagaaatttcattgaaatcataaggcagtttaagcataaattgataaaaatagctgtgtactactaattaatagaaaatcattcaaccaagagaagagtcaagtgaatatcgtttgtttatttgctagtgagtttctttgtaacgttgattttattaaatgataatatttggttagtatgtcctatgttaataaaaatgaacaaaattaattttgctatgttcaggtgtcttgataaaataacaatgctccagtgttgttgcttacatttagcactaaattttaacacagggtcagtgagtccaggttttaacttcttcatgcctggatgggataaaatgtaattcattgttaaattaattcatatttgtatttattaatcactgtgacaacattaaccatttgttcttaccaggaagtggtcagattatcatctgagttacagttagactggctaagtttggtattagatcaaggggaatgtccagtaaacagagaggtaagcatgatggaaataatgaagtggggtacacaggaaaaacctgactagtgaggaggagcagctgagagatagggtcagtgaatgcggttcagcctgctacctctcctgtcttcatagaaccattgccttagaattattgtatgacacgttttttgttggttaagctgtaaggttttgttctttgtgaacatgggtattttgaggggagggtggagggagtagggaagtggtccttttacaagaattttgatgcataagtgtctattgtagggtttggatgatctagtaaagtgttttagaacccctttttatcccatgcaccattcagtaaacataaaaatcacaattctgctaatgtcatttggaacttcaaaataaatatcttgtctaaaaacaaatcagaccgtggtggccttatttccttttatatatctataaaatttatcaaagtaacatgtacacagttttaaaaaataaaatagtaagttctaaaggctttatgataaaaaatagtagtccctgcctgaactttccttccctcccagaggcaatcactgtgactccaaaagttgtttcttcttttaccttagtgtatctaaatagtatggctattctgttgcttgatataacaattttagacattattgttacatgatgttacatgatttagctctctaacacacatactttgccttctattatgtagttatatcataatatttagtaaatgcattagctgttatttaagtatgactgtataaatattttataccctagggcaaatgtaatatgattttcttttgcataattttatttttcctggaattaataattgccttatttaaaacatttacataactttcttgcaacattatcttccttgtattgaatttgtagcacatttctaaaaatattctaatttctagaacttctttcattttattttgtttccaaaatatcctacttagtttatagatatcttatttttctgaggatatatatatatgaatatatattactacttttgtttactgctctattaacaccaaagtttatttgttgctatttgtaatttgttttttctcttgttcatataggcgaatttcctgttatttctggctagtcttggcaatatatgagtagactccaaaacactatttgaaagctctgtgtttgtgggcagtgcttcaaggggtctagggaggttctcttacttactgcttttaactctgcttcttccttgtcctccatctcacctcctgatttccacttcacacatacttccttgtatctgtccctccccatatttcttccacttaattgtctcccatttatttctccagataaaaattctctggtgttctacctgtgagagacagtgatggaagtgagagatcatatttttatggctaaggggtagggcagaggactttggggatcaggccattctgttgtatatgctttcaactagtcattttcaggcctgtccctgcctccactctttgctgtaactttcacctccaaatctgagcttctcaggggttgtggaatcaatcagcatgcttccctctggtatccgccttgtagtccctctagattgcagctttctctgttcagctcagtcatattccatctgctttcagttttccacaaatttgttgaaatcatttgtctgttgctgcctcctctctattcaaattttgggctcatatcttttttaaaattgtttttcagattatcatatggtaaattttacttctgttctggtagcatagttttgtgagttttaacaccagagataaagaaaagtaccatcactccccaaataactccttatactatccctttgtagtcattctcccttccccccactcataatccacaatttgttttctatccccatagttttatcttctagaaagttctaaatagaataaatgccatatgtaacttttgaaacgccttcttttctttagcataatgcccctgagattcatctaagatgatgagtcttatcaataatttttctcatattttaaaaatttctttcattttactatagtgggatggaggagagacaaactcatggggccagtccactatcttaaatcagaaacaccttgaagcaaatatacccttcaccttttggtgattttataatgtttttaaaaaaatcttaaaagataaacttgttatgtactttaagtggtattaataggagcttgtctgtttgtatatcacaagcttttctatccagggtaatgtggaaaaagattgaactccccttacatccctttcaagcttgttatgtcactttgtttcaagcacagaattgcagacaatagctttataaatttttgtcaaattgctgtatcagtggtgtaaaataaccccagggcatgttgtctttccttttcacaacaaattttgtgaaacagtatgtcctttatattttcttatcatcttcagcttcagtcagggtcaggttttcacctcaagattacatcgtttgtactctgttgactgtcacctgtgtctgaaagattcagtagaaagagtatgggtttcaggagtaggctgatacggctcctatacttacaagctgtaccttgcaattgcttaaatcttctaagccatttacctttccttgtctgtaaaatagggatttcaatacccatttgacagattttgttttgagcaataaggaaagtgacagttaaaaagcatttagcacaaagcatagaaaaatagatattcaatgaacaattcccattcttttctgtcagatcaagtgaactcacccttatattgatctttttgctccatttgataggcattttccttcccacttcatctttagcatgtggcttctgtgaatgactcctgatttttttccccttatctgttccttagtctcctttgtatattmcttaatgttgggagttctttgagattatgttctgtgcctttaagttacacattctgcctgaacaatcttaagtaccttattattccrttgtcttaacactgactgacttctctatcttttcttgtgccttgacatctgtcttgagctctagatttttcattattaatctcttgagaaatgaaggttaataatgaattaacctaagttagtaaggcccaagcagcaatcattccacacaagcctgggtttaataaggtcaaaacaggaataatctcacaccaacctgagatttcttacattcctcattactgtgaatggtatagccaaccaccttgaggtaagccagaaacctagctctcttctccagctgcccaacctaatcactgtattgtgttgatttttgaatgttcttccttttagttgggtctctcatccctccccttatctacatctctcttgatgatttagtttaggtttttcttcctccttggattactatgagagctttctgacagactctctgaccctaataactcatgcccaatccagccttttattactagaacgatcttgaaatagggctccgattttaacagtttgctacttgaacctctaagtagcccttcaagttgtttaattcatcactgaaatcagccttccactgttacctcattcttcatttgttctgcaaatcaaaccatttgcaattccccaagacatttggccaccctgtcttctttgcctttgcaaatgttatagcttttgcctagatttttcttcttacccaacctttcttcccataatagtaaatatttattgagttattttaacagccacccaatgatgatgaatactgttatctccattttaaagacaagagaaactgaggtataaatagattatgtatcttacsttcagtcatgtcactaccactaaatggcagattcaggatctgtctgacttccaagttcttaacaacaatatattttttttctcttttcactccatctaggcctctgtttttgcagttctgcagcacatcaacgcttgattccaaattcagattgttaatcatgttcttgtcctacatctggaatgacttaatttctgctccatttattctaccagaccttgccaaaattgtcttttgttttttgagacggagtctcactctgtcaccaggccagagtgcagtggcgtgatcttggctcactgcaacctccgcctcccaggttcaagcgatyctcctgcctcagcctcccgagtagctgggactacaggctaatttttgtatttttagtagagatggggtttcaccatgttggccaggatggtctcgatctcttgacctcgtgatctgcccgcctcggcctcccaaagtgctgggattacaggggtgaggctataatccgtgcccggcccaaaattctgtctttttacaaccttagcccactagtttctttgaatttcccatacaacttttgttgtaccagtcatctggagagtcatttatgtctgcatcaaatttactgttatgtatgatattcctaattagattatattctccagaaggtcagagactttaaaacaatattcccttgcgtgtattacaaagtgttacattcatagtaggtaaccggtaattattgttcaatggggaatgactccatgttgatgaaaagagtcaaactctataaaatattttaagagatttattctgagccaaatatgagtgacacagccctcaggagatcctgggaacatgtgcccaaggtggttgggatacagcttggttttatatatttttgggaggcatgagacatcaatcaaatacatttaagaaatacattggtttggttcagaaaggygggacaactcaaagcgggggacttccaggctataggtaaatttaaacattttctggttgacaactgattgagtttatctgaagatctgggatcaatagaaaagaaatgtttaggttaagataaaggatgtggagactaagttttattgtgcggaggaaactctcagcggactgcagagagagcaggttataaaatgtgtcttatcagacttaaaagagtgcctggctcttagttgattatctcctggatctggaaaggggaaaggagattctctatagaatgcggatttttcccacaagaaactttgtagggcaatttcaagatatggcagagagacatgttttggggtaaaacattttgattttcttcctccttatgccagagtcacatgggaaagtaagtcataatatacagggttaaataaaacccatctgatgagaatttgtggtttgtagggcaggactccccagaccctttagatatgaatttgggcaagataaaaaaaaaaatcagagattagtcctcattcatatgttttatgaaattgtttatcataaggactttagagtcagagaaaaagatcattaggagttagtctaactacttaagtttaatgatgaaaagactgaggcttgcaattaaagtatttaataataaactaatacagcaactaagatagcaactgtttcctgatgtccaaaagtgactcagaatatgataaagtatggaattatattgaaatgttatcttttacctaaccagtagtttgtaacattaaagttcacatgaaactgttctatatttttataaaattggaagttggttaagcatggctctagaattaacagatgtgtgtacgcacacacacacaaccaaatcacacaaaactattctggcttccctctgtttttgttacttatcgattctataggcaggatcaaagtcagggttatcttgtctgctaaaaagcagacaaggaaaaaaaggaaaaaaaagattgggtaactgtcctctggtaactttgcatcagtaattatgagatattttcacttagtactttcgcatctgatgtccatcttactgacgagacttaaaccattacctacctcaggtttcccagatatttcccacatattccccctgccaattttgttatactgttacaaaaccctccggagtaagtattttccgaaagaaccattttctaattttctaacattacaaaagagcaaggataaaagaaccccaaactgatgttttggaaagcattctactttgaaagtaacttctggttcagaggatgamttttaaaatgtggtaatgtttctggtgtgcctgggaagatgcaataaagtttgttaggtacgcaggcaaatttcagtcatttgtatgtcaggataatcacaacttacagaaaaggagcaagaagataatgaatgaggaaccctgggactgaaaacatttggagggagcacaagtactaagacagatgttttgaatttttatactcaatagtccattcttttgtgcaggatacagttcattcatttaaccaatgtatattgagcattttctatgtgccaattactattctagatgccagggatacatgagtaaacacaaccgagtttagagcagagtcatatgatccagcttaagttcttaaaagaatcattgctgtgtggaagatagtggaagagtggaaacagggaaacccgttaaaaaggcttttgacataatctgaacaagagatgatgatggcttggccaacagtagtagtactgttggagataatgagaagtggttcaattcagattatattttgaaggtgcagccaatagaaatttttaataaattggtttatagagtatgatagaaaacaaagtttaaggcttgaaataaggaaaattgcagaggagaaagttggggaataaggagtggaaagtagaattcagttttgtttgtaagtttgagatgcgcattagccatctaggtggagatgtctcaagttaatgggaaaggccaggcgagagataagtgagagttgtcagcacatgaatagtttttctttcctaaaacaattctttcttcatacaatctacaggaagtgggagtagtagttcaatgttagatgaaatcacaaaatggatgaatgtagaaaaaaggtgagaaactgaaattttagaggtttaagaggataaggatccaggaaaggaaagtaaaaggagcagccactaaaataggagaaccaccgaaggagtactatggaagccactttaagaccatgcttcaaactatcatattctttcttacatgtatggtttacctccaaattaaaaagtaaaagtatatggtgagggacggattaactatgttaaatgctgctaatagatggagaaggtgaaaattgagattgacagtttatttagcaacctggaagctattggtgattctaaacaagagcagtaaaagcctgcccaaaatgggatcaaaaaaagattaggaggaggagaaggagagacaagtataaagaaatctataggatggtaacggtaatcaaaggagtttgttcgtttgtttttaatttgggaatgtgttaatagatggaatgatccagtaaagggggaaattgtactgaataacatgcatacaagaatctatgtctactttaggatctatttaatgtgaattcatggcttttttttttttttttgatatgaagtctcactctgtcgcccaggctggagtgcagtgragcgatcttggctcactgcaagctccaccttctgggttcacgccattctcctgcctcaacctcctgagtagctgggactacaggcgcccgccaccacgcccgccttattttttgtatttttagtagagacagggtttcacggctttagccaagatggtctggatctcctgacctcatgatccgcccgcctcggcytcccaaagtactgggattacaggcgtgagccactgcgcctggcctcatggctctttttggacagggtcataagcttyttagatctgtcacccaatgtaattaattgatgtattggttaatactgtctttagcagtgctaggggattggtaagaaatccacatcatctctgcgcttgggaaatttacaatctagagttggctaagtggagaaaacataagagagcacatacaactaacaaattcagattatggacaatgtacttaaaaaacccccacgccctagctattggcacgtggtaattttgcccagagttttggttatatgcataatccagaggggtgtagaaaaccaggtcctttcagtaccratctaaggaagacatgaattggggtgtttataaaccttggtgaggaagagaattttaactgggactggtaacttggtgggcccattgacatacagtagattgtgaagaagaaaaccccaaggattataaggaatagttttaatattactaatttttatcctttgctgaaactatgggtttcttatttgaaatggcaatcaaataatttgtaagagtttgtagaaagtggaaagattattgtaatacagggtagatatttgcatttgtacatacttgagggtaagtacaagaaataaacacttgtaatggggattacttaagcaaaatggatgacaccgacagcctttctgtacaacaaataattgctgtgcttctctactccagtaatgaatgtagtgccctgctggatctgggacagcaagacttttgagtccagattcgccatcccatttcttgttccctaacgtttcctcagaagcgagcgagcctcttccacaatttggggacactgtggaagaacttcttgcttggggagttctgcagcagtcgaaggtacaagaatataaaaactggtatctcgacacagctcttacascatattctcaacacaaggaacagtaatgtgccgcagcaattccttcggtggaaaaaactgactgtatccgcgtaagaggagtaattcttttttgaattttatgaggcttcagagctgtatttcggccaacccagtctttgttcagtttctagcggcttcaaggttgcccagttttacgccttctcgctcaaaacagacactagttttctttgatagcctggtctcacattgacttcatctaagcttattacattcgtctcataaatcgtttgctttttccccagccttagctccakggaccmgcctactgaacatcgaaaaggtcaggaacgagatcacgggactgagacggcgagccggctagagcggatagagccgtactgccgctctagtttttcttttgctctctatggttaggagcgcaagcctctcttcggcccggaaagatttaagttcgtgaatgcatacgcaagactcggaggtagttccggttccggcgtggccattttcgttggtggtgttcagttgtggcggttgctggtcagtaacagccaagatgctgcggaatctgctggtgaggagcttctcatcttgcattcatgatgggggcgagggagtggagaggaggctgaggcaccacgacagaaaaccctcacctgggaggggtgccgaaggcggctaatgaagtcaccttgattcgtgtcctttttccctgaccttactttcccttccgtctattcctctcgccccaggccgttactgggtagatgtaaggagtggagaggcwggggaagtgaccagagactcgtgggttagacccgtcttgggttcttagtcaccacctctaaccctgtcggtcattgatgaggttagtagctccgatctgagtaaaaccaagacccaggtggggagtgtctgacacccggaagcatcaagcagaaaggtgtttttctggtactgaaaggttttaagtttcaatggttttgagctttgcgagcttgagaaggcagtttaaaaaccaagccattcaattttgggtggaactttaggaatagtcatggctgaagtgcagtgttatttccgtcaggcgattgtgcattgtccttcacccctccatcgactttgagcatgtgaaatatttccccaaattttgataaagaaaaatgcgacaatgattattttattttttaaattatttaatgaagttttgcttcattaaaatcctcaatgtaattttagaaaatcgagagcatatttgtttcattatttaattcaactggatatgtagtgcatgtctcttctttaaaagwtgtataccctctttaaaattttttaggaaaaatgtaatgagagaagcattttaattgagaaggaatcatgccagtctatttgctgtcaagtaatagggttttttttgttgttgttgtttttatttattttattttattttattttattttatttttttttttgagacgtagtctcactctgttgcccaggctggagtgcagtggcacgatctcggctcactgcaatttccgtctccaggttcaagcgattctgctgcctcagccttccaactagctgggattacaggcgctcgccaccaagccctactaatttttgtattattaatagagacggggtttcaccatgttggccaggctggtctcggactcgacctcaagtgatccgcccgcctcagcctcccaaagcgctgggattactggcataagccactgtgcacggccttttttatttttttattttttatttttattttttgagcggagtttcattcttgtcgcccaggctggagtgcagtggtgcaatctyggctcactgcaaaccccgcctcctggattcaagcgattctcccgcctcagcctcctgagtagctagaatttcaggtgcgcaccaccatgcccagctaatttttgtgtttctagtagagacggggtttcgccatgttggctaggccgggtcttgaactccttacctcaggtgatccacccaccttggcctcccaaagtactgggattacaggcgtgagccaccgcgcctggccaagtaacagattttttttttttgagatggagtttcactctttttgcccagtctgtagtgcaatggggcgatcttggctcaccacaacctctgcctcccgggttcaagcgattctcctgcctyagcctcccgattagctgggattacaggcatgcaccaccatgcctggttaattttgtatttttagtagagacagggtttctccatgttgttcaggctgktctcgaactccggacttcaagtgatctgcctgcctagtaatagaattttttctttgaaacggagtttcacacttgttgcccaggctggagtgcaatggcgcgatctcagctcactgcaacctccgcctcccaggttcaagctattctcctgcctcagcctcccaagtatctgggattacaggcaagtgccaccacgcctggctaattttgtatttttagtagagatggggtttctaatgttggtcagagtggtctcgaactcctgacttcaggtgatccgcccccctccccggcctcccaaagtgctgggattacaggtgtgagccaccgcgcctggcaggtttttgatgatatggcagtatattatgaaaatatttgggtttggtgtattttggttaagcactatttttgtaatatgtgtatgtcaatatgtttgcatcaaggattataaaatgctactggttctgttcaggtagagatcatgattttattttttggttagaatctatatgaattgcttcttgaatatgttatttggagactgcagaatgtaattcgaagagcagaggatggataacaaattgaaaaacctggatgctcttgcatgactttgctgctgacaaatcagatatgcttcaagtctcaatttaccttttctataatatgaacgactgaaaatagttggttttgaaggtttctttaggctctaagtctatttaataatattttcattttaggctcttcgtcagattgggcagaggacgataagcactgcttcccgcaggcattttaaaaataaagttccggagaagcaaaaactgttccaggtactgaagtattttataggagatgttacttgtaattattagattaccaaaaggtaagagttgggataaacaagtatgtgtataaattagatcatatgacaatataaacattacaaaaaaagtcaaggacatgtaccatagtgctaatagtggttgtctcttggggaaagacctggtggagcagagcaatttacctttataagtagtttgattatgagtgattttkkttttattatggtttctagcttttcctaaataaagcttaaagtgattaaaaatagttgtatcatatatacctaaaatacaatactttattgaacagatgtactaaatagctactgtatgctggattagatgctagggatataatttagggttataaaccaaaatcccttccccacttttttaagggaaaaaagtttcctatgactaaatctaatgtgtggcaattattggttcttttatatttaagttatattaaagttgttgagatcagtgtgtatgttttatagctttaatgtttatatattctttggaaagaccgtcattaatggatctcaaattaacggtgaaagaagaatgctgacttttaggaattcttattttaaaagtagtagtagtagagacrgaataaagaaaattgtaggtcttttaaattttaatacttaaaatactttaattctagggatttaargagctatatcattttatatgcctgttcttttraaacttagttggaaatgagtgagacatttattattgtcttttttttttttttttaaatctaggaggatgatgaaattccactgtatctaaagggtggggtagctgatgccctcctgtatagagccaccatgattcttacagttggtggtaaggcctttggaatgtttgaaggtttatagaaaagtaatagtaatgataactgataactttattgcttttgctatgccagtattttaatgcaggcagtttgtctccagaatttgatatcttactatatctcataatgattcaagagggtgactgatacatactgtataagagcattgtgatgtcttcttttttttttgaaatggagttttgctcctgttgcccaggctggattgcaatggcgcgatctcggctcactgcaacctctgcctcccgggttcaagcgattctcctgcctcagcctcccgagtagctgggattacaggcgtgcaccaccatgcctggctaattttgtagttttagtagagacggagtttctccgtgttggtcaggctggtcttgaactcctgacctcaggtgatctgcccgccacagcctcccaaagtattgggattacaggcatgagccactgcgcctggccttgatgtcttaataaaaaaataacaccagtaagatttgatgattatgttgtgatagagttggctttctgagtcccattgatggcagtgaaggctatatttcagwcaaaaacatccattatatcccacctcttacagcaagggctttaaaacattttgactgtgatgcaaaataaaagcacactttacatctaaactttgtacagacatatttatgaccaaaacaaaatttgtacagaacaatacttccactggaaggtaaagagaagggatgctatatttgagtgattattttatgcctatcatattcataggaatgccacatacttggatttctgtgagtcttgcatgaagtctataatatgtcctcattttaaagatgaagaaatcatattaattacctgtttgggaaactctactctcacaccacaacaatcaacatggaagatctctgttgccaaatgtgtgggggtttttccctgcacaccaagtaatggacaccagctaggtgtcctccagttcagtttccacactatctactgggagatagcatcagattccacaggttgatggcacaagactgtcccctccttcccaccagttgcaagtttgggtcttcggaacttctgactgactggctttaagttggggttcccacaatctcctcgttggggaaacacatttaccagtttattataaaaggtataggctgggcatggtggctcatgcctgtaatcccagcactttgggaggctgaggctggcagatcacctgaggtcaggagttcaagactagcctggcacacatggtgaaaccctgtctgtactaaaaacacaaaaatgagtcgggtgtgatggcacacacttgcaatcccagctactcgtgaagctgaggcaggaagattgcttgaactggtaggcggaggttgcagtgagctcagattgtgtcactgcactccagcctgggcgacagagggagactccatctcaaaaaaaagaaaaaaaaagataaagccctaaattccttttggccaatgtgacatttcttagacattctggtaagtagtttttaaaatgaaattccagttatcagcttttttttttttttttttttttttgagatggagtttcgctcttgttgcccaggctggagtgcaatggcgcgatctcggcttactgcaacctctgcctcccaggttcaagcaattctcctgcctcagcctcccaagtagctgggattacaggcatgcaccaccacgcctggctaattttgtatttttagtagagacagggtttctccatgttgaggctggtctcgaactcctgacctcaggtgatccgcccgcctcggcctcccaaagtgctgggattacaggtttcagcaactatgcccggcccagttatcagctattttttatattacatttgattactttaaaattatatcactctttttttttacattcactttagggaaggcttgcatattttgaactmtttttttctttggcatttaatcatccttagcatttctcaggcagtcttgggttaatatggaaataacctttgtatacgttcttaatcttatttttaaaaatttttgcattttatgttgacaaatatattattgtgccacactttctatattaaaactagattaaatatattttacatatatttatttaaaatttttccagcacctatyaaaatacttttttgtgttccaattaaggtagtcttaatgcaaacttacaacttttgaactggaatattaaatttatacacttagatcttagaatttatggttaagttcttttttgttttttatttttaggaacagcatatgccatatatgagctggctgtggcttcatttcccaagaagcaggagtgacttcagtcatcccagcaatygcttggttcagtttcattcagctctctatggaccagtaatytgataaataaccgagctcttctttggggatcaatatttattgacttgtagtaactgccaccaataaagcagtctttaccatgctttgtctgattttatcactttatgccaataatttcaacttttggtcagccttgtaaatcttaggtaaggatcaaagaaatgattcttttgccactaaacttgtgaaagcaacattattgtgatgttattttagtgaaattttacttctaacagctcaaaattagtctcaacttctgtctcaacttgccgtttgaatgcatattgctttttccccctacccactccagtatatcttggaatatgctagaacccgggggtagtggaagcagattatctttggctcctggggtctatatttcttttttttttttttttctcagctatgtgagagtatgcttaaatattggatatatcccacagcttagaattaggctttagtagaatggctttgtaagatatttcagtatttgtttttttctacactccgagtgggttcaggtaggtttctctcatcaggaaccaaccaaagcaggacagttcctgggctccccagctatcatctaatggacccacaactgtttaacctaaacagtagttaggtgcttaataaatggtagccataataggctgctcataataggaatgtttcaaaaaggtctatttagggaacacaaaatccaaatagatacagagagtaagaatcaaaaagaattacgatgctgctctaggtagtttgcttcagggtttgcagaacccttcctgctttgagagaactatgcatgaagctggaaatttcatagacttcaagtttgggactcccttttcctgggtcctgttgtgcatccatgtggagagtagcatcttgtgaaccacttcaggactttccttctatatatatcgagattggtaattcgtcaagagatactgaktgcctactgtgtcctaactggttttaggtacctaggaatcactggtgaacaaaagcagattcttcccctcatatgttatagaaaggggtggtaggaaagagagtttaaaaataaattgcacagtaggttaaaagataagttctatggaaaaagaccaaaggggagaactcacatgggtgtggttggttggttgcagtattaaagttaggataggcttcaacaggaaggtcagattatttcgagacatccgaaagtgaactggtcagaaacagtcatcccactgtgttagaaattggttctgggacctcccacagatacggaaatctgtgaatgcccaagccttttatataaaatggtgtagtgtttgcatgtaacctatgcacatcctcctgtatactttaaataatctctaggttggttataatgcctagtgcaggataaatgctgtgtaaatatactgtattgttttggggataaggaccaataagaaagtctgtatgtgttcaatacagatgcagccatttattttttactaaatgttttcaagctgttggttgaatccacagatgcggaacccacagatatggagggctaactgtatatgggcaaaaggcactctaggaaaaggaaacagcctagagcaaatgtcctaaggtgcctggcatgttcaaagaacagaaaggcaagagtagataccactcagtgggtgatggagaggaagttagtagggggtgggccacatcaattagggccttgtaggttattttaaggactggcttttgagtgacatggagagccatcataggatttctcaatgaagaatgacttacatgttttagaggactagcctgattgttgtgataaaatagaccatagaggggcagcggtagaaacaggcagatcctttaagatgcttactgcagcaacctagatgagaggtgatgaagactaagagcagctgttagccatgaaaacgatggaaagtgttcagattatgagcagaggaggatctttatcattcacttaaaccttacccttcctcatccacccatcccacaatttcttactgagtatgagtctactgtgtataaagcactgttgtaggctcagagaatacagctgtgaaatagatgagcaagccctttcatgggtcttacattccagttggtggagatagacaacaaataattcataagcctgatactgtcctatagtgggaactgcagatcaacagggtgatctattaggaggaatagcgcagtggaagctagaaaagggctgagtaaagttacatttgaactgagaccagaaaaaaaggagccagctaacagtgagaagaaaagcattccaaggaatgggaaaaggaaattgctttgcagggatgaattgcagaaagaggacaagtgttgtagagtatagggagtaggagaaagcagctgttgttctctcttccacagtgactagcacaacaaatggttataccactacacacagggtctagatagatttgttttctggtttcataatctgcaacacgatctgataactataatattgatttagcaagaatcccaaatataaattaatgtagacaatctatctcaggcagttattgttactatcattagtaagaactggaagctgagaacataccgagatcaaatacacaataattacatttgaactagaactcaaacctagatatgtcttattctgaagccctttgtttatgtgttatgtaccatgttattcctaaatgcagaaaaaaggaaaaaagtacttaggataattttactggttgctttccccacaaactttattccttttgaatattgttgtattcgtggttatgtttgatgaattagcatcataagaattggcaattttttcatttcgctcttctttcagactcctgtgagtctgactgtgtatctattccagttgcctatttctattgaaattatagttttacagctgctatttactatctgaaaaaaacacaaaaaaccagcttctacaagtcaaggatattttgaaggactcattaatgaggaaaaccaataaaaacccaagacattttctaaatttttatctcagtataatatactggagggaaaaaaggattaaatgtttacaattacattgcttggaaactagaaaattgcctactgaaatggtaattgtaagccaggcacggtggcacgtgcctgtaatcccagctacttggaagctgagaagggaggatggcttgagcccagcagttggaatccagcctgggcaacataatgagactctctctctctcaaaaaaagaaagaaatggtaattttaaggcatacatgaagtcagttaaaggaagggaaattcgtaacattagatattgcagacttagtgccagaatatatgcatgtatgtatgtaaatttggatttgagtgttgatttctaattatcaatgttgcattagtacaatgtaagatgggctgtttcttgaattctgagattatgccagatctttattgacctcttggaggaggccatcatcttccctctggggagctgctaaaaatattctctagcattagtctggtggctaaaagctggtatccttgtttggccttgttttttctctttccaggccattttaccccagttaatgcagttataactagaacagcctatggccattaacatttggatactctccctacagtgctttttcctaaaatagtacctgctttgggaaatcagtatgcagtgaaccatcttgactgttttggtcacaaaaacatatctttacagttgatcgtttccccatcttaattctatgctaatgatcattaaaatgatttcaaaaaaagttttctttccactttagttggaccatacaacaaaggaacagaccaggaagtctcagtcaaggatgaggagcctggagtctcttttttgtttacctctgtccatatttatcaaaaaaatgtctggacgaaacagacagaatccctttacagaattgaaagacaaaagcaaacaaaacaaaacaaaaagatgcatttctcaagaagtaattttgaacatgagtttatttctcaagtcttgaaagattccctatgttgatttcccaaagctgtagcagcctagcttaaatcatacatttttgataactggtttccaaatcaagccttttagttggtagaaattctttttttgttttagatgattataaagtaggccgagaaaaagaagtggagttatatagaacacttaataaagaacaccatgcgtttattattatttaaaaaactttctgattataaatctcattcatacatatagtaggtacaaaagaaagaagaatacttcgatagtgttctgctctttgtcctatgtataaacaactggagcacaggagtatttttaggactctctccatctcttgtcatggttcatcctttgaaattcccttgttgagcatggcagaaatgtatcctctgatgacatgcttcccagcttcaccactgatattagatggtttgggctgctgtaacagtataccacagaccagmtggcttcaacaatagaaatttagtttctcacagttctggagccgtaggagtcccagatcaaggtgccggctcatttggttcctaatgagggctcccttcctggcttgcagatagggtagccttctcacatggcctttccttgtgatgtgtggagagtgaacaagttgtggggtatctttctctctttgtaaggacaccaatactatcagattgggcccccacgcttatgacctcatttaacctttattacctccctataggtcctatctccaaatatggttgcattgggagttagggattcaacatgtgaaattcagtgggacacacctgacagaaaataaaggctgtttttgattccaagttcaaaaatttcaaggaagggctctgactgcctgggatctaccaaatgaagggtaacattgttggcagtttgttttagggctcacttcctgccaatcggtggcttctatttaaggagctaatgctctgaagattttcttacagatgaaacctctttttattttttatttatttttacttttcttgagacagagtcttgttctatagtacaggttggagtacagtggcatgatctcgactcatgtcaacctttgtctcccaagttcaagcaattctgtctcagcctgccaagtagctgagactacaggcacgtgccgccacacctggctaatttttgtatttttagtagagatgggggtttcaccatgttggccaggctggtctcgaactcctgacctcaagcaatccacccgccttggcctcccaaaatgctgaaattacaggcatgagtcaccgtgcccagcccatttcttgattttttgatggggcactattgggggtaggagaaaatatgattatagaaattcagaagatttaggcagtaatatataagatggaccagagtggagataaaatggataatgaggaggctattataataaactaagcaagatttcagactattgagcaaagtgagttgtcagcttggatgaaagtaagggtggcaggaggtgctagtaacgatattaacagtaacctaatatcttataagttatgttttgtgtgagacgcagaataactgccacaaagaaagcaaaatcaatagaaagttaataggaaaatgggtaaatttgtaaaaaggataggctacattattcttagatttctaccttctataaccagaggaaaacaggaaagcagacagtggagatgatctagggatttcagttataatttacagttgcagcattttccttataaaggaacacaacctccaagacacttgaatgtaagaatataagaatggtagaactgaaaaagcactgttcaggagacgtgaggctgttaatgctgtgttatgctgaagccatgccagcttgggagtcagctgaggttacatctacactagttcccaaataaccattattctgagcccccacctgtccattcaggaacattgctaccctttgaagttaattttttttgagtcattgacacctcacatgcccaggaacatgattttccatatccccgcccaccccttcttgtccactccaggagaagaagtcaacccatccaggtgctgctgtgcccaaagctctgtcttcacatgctcccaaagctacccttccttgtgtcctggggcagagctggtttgta

SEQ ID NO: 94021 - DNA, 15343 bp, Homo sapiens
  misc_feature (1)...(15343): n = A,T,C or G
cccaggctggagtgcagtggcactgtctcggctcactgcaacctccgtctccagagttcaagtgattctcctgcctcagcctcttgagtagctgagattacaggtgcatgccaccacgcccagctaatttttgtatctttagtagaaatggggttttgccatgttggccaggctgggctcgaacacctgacctcaagtggtccgcccacttaagcctcccaaagtgctgggattacaggtgtgagcccaatatttgatttaaaaagacatgcttaatgtaccaatacacatttttagaataaaaggacaaaatatgtttagttcaacatcaattttaaaactgaaacatggttctggagccttaggagtcccgaggtgcctgggaaggagcacagaccttggaggaagaatcctgccacgccgctgtctctggctgctctgagacttggctcccgtctgtgaaatggggacactgacccctcacttgcagggcttttgcgcggactcagtgagatgacatgttggaagcctcccgcttagctcctggctgccaggagcatctcagtacatgacagtttttagatttttgtgtcccttttaagaaaaataaattcaggggcccttacagattctggtcctggggacttcccttcccatttcaaaggaaaaagaaaatgttttcaacttagggaacacaagccacagggacgggtgaaagatctatcaccagctggtgcactgaggaactgggaaggaggaattgggggcttccagggacgctgacgggctgtgtcttcctttctcctccctgggtctcttttactgtgtttcttgtaggggatagaggactccctcaggatggagggcttggggctagagtcctttctgtgtgggattgggaagtcagagtttgcagggccatcattctggcctgaaatgccttccagagcagaggtataaaaggcttctcttccccaggagcaggcccagtgccctcgaggtgtgctcagaggtcaaacgggcaggcctgagagatgactgggagttggggcctggccccctgtcccgcaccctcctgaggcacacacccaggcctcacgcccctcccctgccttcctcctgggctgggggagggtgccgttagagcacagaaggaggatagcagcagaaagaggcagcgtcctcggccctccagtgccagggcctttgtcccctgcccagcagccgcgtggagcccccagcactcttgctggctggcagccctctcaggcccagggagctccagnnnnnnnnnnnnnnnnnnnnnnnnnnnnnnnnnnnnnnnnnnnnnnnnnnnnnnnnnnnnnnnnnnnnnnnnnnnnnnnnnnnnnnnnnnnnnnnnnnnnnnnnnnnnnnnnnnnnnnnnnnnnnnnnnnnnnnnnnnnnnnnnnnnnnnnnnnnnnnnnnnnnnnnnnnnnnnnnnnnnnnnnnnnnnnnnnnnnnnnnnnnnnnnnnnnnnnnnnnnnnnnnnnnnnnnnnnnnnnnnnnnnnnnnnnnnnnnnnnnnnnnnnnnnnnnnnnnnnnnnnnnnnnnnnnnnnnnnnnnnnnnnnnnnnnnnnnnnnnnnnnnnnnnnnnnnnnnnnnnnnnnnnnnnnnnnnnnnnnnnnnnnnnnnnnnnnnnnnnnnnnnnnnnnnnnnnnnnnnnnnnnnnntgggcattaggatttaatggaaccaggtgtggtggctcgtggctgtaatccccagcactttgtgaggccaaggtgggtggattgcttgagcccaggagtttgagacctgcctggacaacatagcgagaccctgtctctacccaaaaaaaaaaaaaaagttagccaggtagggtggcaaactcttgtagtcccagctacttgggaggctgaggggagaggatcccctgagcccaagaagtcgaggctgcagtgagccttgatcacaccactgcactccagcctgggcaatagagcaagacctcttcttaaaaaaaaagaaaagaaaaaaaagatgtaatgtatgaatttgggagacacaaagattcagcctatagcagggtcttcctcctctgcctgtcccccagcatcctgtttgctgacatcgagggcttcaccagcctggcgtcccagtgcactgcacaggaactggtcatgaccctcaacgagctcttcgcccgctttgacaagctggccgcagtgagtcaccctgagccgggggttggggtggcctgacctgggctgttgagggaggctgctgtggtcgaggacctgctgaaccccagggatgggcatgtgcctgggtatatcctgctgagcagagcctgctggtgatgggcagaggggacccttaggctgcggctgtgtcctcacgccctgcgtgggccctggagacacacttagctggagttgctttcagcactgtcgctgaccacaagcgagagtgtagggagccctccatgccccccatccttggaagcgggtggtgaggcctgccggtcacactgcccaaaccccaggggaataagctgtttgtctggggcatattaggggccatcaagctacattcctgatgagattggccagactgataagagaatgagtctgaatccccagctggcctgcaggcggctgtgtgcyattccctagcggcatccagaaagaggactcttaaacgtttggataaattggaagtaacactccatggccgggagtggtgaacgacacgttcattccttaggcccctattcacccctccattatcctttcccagctctaggcctttgtagagtgattaaatgtcagtggccactgacgggtggacacattccccttggcccacacaggacgccaggccgggttattgatgagaggctggtgccgtcagtgccagtgccagggcttctctgggggcttccatggtggagcgcatatacttacctgtggattttgtcactgaactgaatgaggtgaatagcacctgcttgtcacttgggtctcaaatgagtccaggccacaagggcacttgaatccctgtttctcaactatctttgggagccagagttggaccgctcataattgatgattactgatattctatcgcaatcccactgacggattggtggtggcctgcaggtggccctgtggcacctgtcactcagcagcagctctgttggattcttggcactcatgtgcttgctagttgagcaaaattcttttttgataaaagtctcagacaggctgagtcagtgagcttttggttaaagctcatttctgcctgcttcagtctttttgtaaaaggaggagaatcagacaacttttgatagaatctcaagcaacgaatcagagtgactcctggggtgtggaggggaccagagacccttgtactggggcttggggccttccttaagctgataaggccaccctgctggctgagctgcagttcgaccagccaaattcctcttggggctctggagtggatctttaaaagtgagctcctgagtctgggagctggaatgccgctcagggctgcccagcccatccctccatccccacaatccctccctccccaatgtctcctgataagcctgtcccaggaccatgccgagttccggcgtgggcctgcgctcactgccctaaaaggcaagttattccaggcacggggtgaatctgtttgcttctcrtttctttccctcccacttctctttcctactatttttaatttgtaaaattaatttkctttccaggagaatcactgtttacgtattaagatccttggggattgttattactgcgtctcggggctgcctgaagcaagggctgaccacgcccactgctgtgtggagatgggcatggacatgatcgaggccatctcgtaagtgtccaccccccgggtaccgtctccctccctgggactgtccacagcccgagcaactgactgacctgccggctgcctagttggaggcagggaaacagtggggtgaaactgtctgccaaaaggtgcccagccaagctgagggttggcgtgtgccaccagactttctgccttctccagggttcctgttccctacagcagcctgggcagcttttcccagaggaagtgtgtgggaggggagggctctgcagactccaggagtggaggagaggctggcagccatgtgaggatcctgtgccgtgtgaggcccttgcacttccggggcctcatgtttcctacagacacccagccaggcatcgaactgctggttccacttcttcccagatgtgaaaggttgggctcataggggttagacaactccccagggtgctactaccaggcaggcggattcaaatgcaggtgttccgcttagagagaatcaccctgcctgtgagccatagcaaaaaggcactttggccaattcatggctatcactggccacagaaggagccctggtcattgaaaaacatgggtggtgcaagcttatgtgacagccaagggagcaagtcagagactttgggctttagaaatagcttgggcaggggcagagaaaaaaggcacagagggcaaggtcagaggcgggagtggctgccaggaaggcagccgggtccgttggtttggctcagttctacttgcagcacttgccaagtgtccccagcaagcctgagctagacaatcagtctccccggaagcacagagccttaagggagagagaccaggactcctggtgctcagatacaaggcacgtcatgtggacacggcgaggtaagggaggcagactattgaaggagggcccaggaggggacagttgattccactgagaggatcaagagagtttgcctgaaggaggtggccgtggagttaagccaaaaagacagaatgagccattgtcaagctaagcaagtatccaaaggcactgtggatggaaagtatttcagtgaaggtattctgctgcagtggaggtatttaccaagttgattcaggacaagagaaatgatgggtgacctcagtctcccctgcagtgggtgtcagcctcttgctgatggcgtgggatggggtcagggagtctcagtggtggtcccacccactggggcaagtcagactgctggtcccctggctagctgagtgcgcccatgccccaggtgttagggagggtctagggccctagaaagtgcaatctgagttcatccattaccctacttcctggcacctgcaccctctcctgcagatgctgggcaggttcccatgggcctcagacatgcacctggagatgtatggcttccttcccagtctgcctccactgctcgcccagcatgaggagttataagtgcatacggagggcctgccctgtctactgggagctcccagatatggatatgtggtgcatgtggccgggaccaagctttcctctagggcatggagcaccctaagcccctgcacctgcccaggctccccttccctcctgagcaggccatacccttgaaacctgggtaaccagcttttgccatcaccctgctaacatcttggaagcagcagtgtggataaatccaataaaaagataatccaaaagccatttctgtcttacccacaagagcattatacaaatagggtttggagtggtggtaacttccctgtttaattcaagtcggccctaacgtgcatttgcatttttccaatcacaatttaattgacagggcagtgctggccagaggtgccctcctggaggggaagcagcagggctctaggttttagtgtggcaccgcgccaccttgtggccaggccgggaacagcccctttcacagccgactgcacctgccgcccgccccagtgcccttcaggctgaacgttcttggactctagggctggatgggagagagaagactctttgacccccgcaccttcaccttccctgcacctgcagcctcacccccattctgtgtgcctggcctccagccttctcccagctttacycctgctccatccccaggttggtccgggaggtgacaggggtgaacgtgaacatgcgtgtgggaattcacagcgggcgagtacactgcggtgtccttggtctcaggaagtggcagttcgacgtctggtctaacgatgtcacgctagccaaccacatggaggctggcggcaaggcagggtgagtgacagcygtgggtggcttggggccccracctgggttcccactcaagcccacccagggtgaccatcctgcagaggcgaggcggggcagggtggggtgggcaggatgggcagcaagcacctgtgggggcgctggggtgagcacagtggaagtagaaattcctctacttgccaaatcacctgtgccaccattggccagttgtgggagcattatgtcacccttccctgagccttgacccagaagatattgacccaaaccatggtggctggtgaggtgtgatagacagagttctggaggagggaggaatcacagatagtttctgggatggctagaccataaaggaggcaggactgggaggggtgaggaaggtggggtgggaagagcctgctgctaggcggagggaacacagcgaggcaaggcacaggtgtgggggacacagcatttccaaggaatgggagaagagccgatggccttttagggacggctaggagaaacagcgcctgtgttcagaaggcatgagtgccaggctcgtgaatttggactccgtcctgtcgcgtgcaggagccattgctggcttctgagcaggagtgagaggcttgcaaagtttgcaagactggaggccatgttgtcttgggcaagctaatgtagtggtctgtgccaggatgttcagtgtgagacagtgtggttgcagtgggcatgagagcccacttgatagtaatggagggtaccatgcaaggttgaggttaggatttgagcagagcttggggccctagggtttgaattgtggtgaacccactaattgcagtttggtttttcacgggggctgacattatgactttgagttttctgccctctccacsctgatccctgcccccctgtagacgcatccacatcaccaaggctacactcaactacctgaatggggactacgaggtggagccaggctgtgggggcgagcgcaacgcctacctcaaggascacagtatcgagaccttcctcatcctgcgctgcacccagaagcgggtctgtgggctgggggccggggggctgaggggctcccttcctccagggaggaacattttcgtgacctgctgcttccttctctttccttgagtgaagtcatgaatttcttatgcagttgcggttcctgcatcttaaaaaggaccccggcagttaggccttgcaaaaaggatggtaaagagggaatcttttaatagtgcttcttttgcaaaaatgcaacaggcctcaaatcagttagcaacaagacatcagaagtccacaagctggaaatcagcatcaagggagtctgtggataccgtatattttatctccatctctctccttttcatttgccttttactggggtggacacttgccctaatctctctctctctgatccatagatcggtgtccatctccacatgtgcctatgtctttgtttcttgaacctattttcccctttccctttctagtctgtttctttttccccctttgtctcagcccacacttgctgaaatataaagctaaattattagcagacttcagtgttctatttttaatagtgtcatgttccatgctcttaatttttaaagcaaatcaagagaacattttctatttctccctaaactaaaatgccttttacttatgagtctttctgtggaatttatctgccagtcagtgccctttgatagagaaaagcttccccatttctcttcctaagaagtgaaacgaaagacaaaattagtctgtgagaagagttcagagagtcttggatgacagcaaaggtgatttttaaagggaggcaggcagggctgttgagggcaggtgcccgtgccaagagggacaccttatcctaccatgcagtaccccaggggacagatcctggctcgggggcccttcatgggagctgtgtcagaccctccacaggcaccaggaagagggatgggggattcagggccctgtggggacagctcctcatggtttccttgacacgtttgtaagcgttggccagttccttggccatagtatcaatgaactgggtcctccaggctctttacccacatctctcrgtgcctgggtcacaaggcctcccgcagcttcctgccctagaccctgagttccctggctcttggttcttttagctggacaagcggtccaaaaaggatgaaatggagacagaaagagtaacaggcacccccaccagcaatgtcagctgaagcaggctgtgtccccaccgtcacctcatctgacaagggagggagttgaggggagggttgcctcaggtctctagctctcttgcacccatttggatggatagacagacagacagatagatgagatcctggggagtgtgttggcccatagatagctgactgagactctgtgtatttgtacaatgcctgtcagctcttgaatctcatarcttcactgacccaaacctctttggaagtggcctcttgggccccgggccgtgtcctagtgccctctctgttgtagcatattttggagaagttgagcagaggttgtgatcccaggtctcctctccctccggtaccccctgggcaacttcagatcaggccccacccacccttgaggctgtagctagagccctaccctggcctgcccatgagcaaagcctgatgtgacaccacagcctgccagggaccaagttgggaggcttaggtatgagttggcctggctgcctgggagacccaagctcagccctcgctgatcaccctgccccacagagtagggggaggaagcacagtgcgggcagctgggtgcgtcagctcaggcctttcggagcctaggccatccagaggagagaagggcacccaggatagaatcttacagtcgaacttacagggagaactccttgcaaatggcagatgttcccaagctctttgctttctcacaagaccaactctcatcatcttttgccactcccacctgagccagccagggctggcattagggagtttggagagatccaggatgcttgcctggggagttccaggatctgggccgagctctggctccagggctgtgcagagaggaaagggcagctgccttagccccttacctggccaggtacgatgtttggggaagggtgaggagccctccgcttggactcctcatctccccccatctctgtgttcgtcttccagaaagaagagaaggccatgatcgccaagatgaaccgccagagaaccaactccatcgggcacaacccaccacactggggggctgagcgccccttctacaaccacctgggtggcaaccaggtgtccaaggagatgaagcggatggtgagtggctggtggggcagcctgtgggcaacactctccaaggctagggccttctgtgggcatgaggcccgcaccagatgcctcgtgttgcccaagggaatctggggagccacacaagcaaatacaagtgcggtttgccccaactttggactaggagtagggcacctgcttctggccccaagctctccccaccaccccgtggcatgcctcattaggctttggaacagactggcagcaccccttcctccctccctcttggcagagcttgcggcacagcctggaagcaggcatgtctggctagactcggccagccacagcctccagctgtctcttggcactgtctggtgaggccccagggagttgggtgggcaccagcttgtcataccctcttccagcacctcctgcatttctcaggcaagtgaaaccacatcttttggttcagttgctcagaaactatcctagtgctttctgggaagtgccaggtggtggtcccctttgccctctgtgctgagaaagaccccccactaatgccagccttccagtgggagcatgtgggctgagcaagtcggggaggccatggtcgggtgtcagctccacctccagggaccctgcctacacacaccgggacaggtgaattcaggatgtgctgcctgggctctggcagcaatgacaggaagatggattcctggtgggaagaggaggaagaagccacgttactgcagtggtgtttcctctcctactgtctgagaggttggcttctgcccctcaggcatgctgctcagctcgggggcaccaggttcccaggtgggagtcacccataccaaggaagggccgagggatggcacagggactgtgtgtgtgtgtgtgtgtgtgtgtgtgtgtgtgtgtgtgttgtggtttctgtgtggccacttagtgaaggaggggcatgttgcacaagtagctccaagtttgggctctgtggagcagactgggttgaggttgtggcagaagggatcagagacggactccctggaaatccagcagggtcagcagacaagagccaggagcctggagaaggggacatgctggggacccagtcgctctgctccttcttagccaacatgtagcagatgatacgagcttaaggaaaatgtacaggaggaaaagtgaattgagccaagacccccatttaacattctgacagtagagacacctcttggccctgggttaccagacagcagagtggagaaacctrgccttccccagggctccaaacttgaatgtccacagacctggtcagtgccactaagggctccagccaccaccctccctcccctgagcaaagagcagttggccaccctccccattgccaccccagccctttgatagtctcctgcagactctgtacccacatgatcagggcagtcaagagttcaggactagcctggacagcatagtgagaccctgtctctataaacaataaaaaggaaaactagctaggcatagtggcatgctccttcagtcctagctactcgggaggctgaggcaggaggatcacttgagcccaggaggttgaggttgcagtgagccatgatcacgccactgcactccagcctgggggacagagcgagaccgtatctcaaaaataaaaataaaaataagggagaaagggggaaagggggaaggactgagagcagggacagcaaaggggcaggagagccgagagagaggaggcattgagcaggaagtggaggggaagctggggagtagggcagggagatggggaggaggggaaggcagagaggtggccagggaagagcagggaacaaccagcagggaggcagggcctgatggtgagagattctttctgttcagaatccttggaaagttattttttagtgatatttgatataagctatatctttagttattttggagtcttaaaggagatagtttggactataagcactgtgttggcagatatattactcatcattaggacaaggaattttggaagaatttgcagtcaggactgtcatggggaagggacagtctctggagaaggaggctgccaggaagtctcctccacagcgttcatcgctttgcccagcagggaggggaaggagtgtggaagaacagggctgtgggaacagaggctcctgtcctggctgggcctggtgtcccctgagggggctgccatcaatggacagcctctgggacccactccagcgtggcccgtgggaatatctaggctggggatgaagacaggttcctcagtgccgcgagggccattgggctttccatgctaacgtgcctggaatgttggagagagatccatggaaggcgagctttcaccctgagctgcccacgctggatgagttttatgagaaacagtccactgaagcagggatggggggctgggagcgcgaagtagtgagtgagagctgttagaaggtttgaagtcggagtcagcagtgccttttaaatctttttccagcttttacccagcttttaaaagtgatgagccgtgctggttgatgcttaggcactagtgtcataaggtctttaaggttatttattaataaaaaggttgccagtgggaagacacgtgtgggcttgagctcctctcaccaaacccaggaatagccggtagggtggggcccaggtgctgcaggagggagtgtaggcagactgggagaggccaagtagccgctgtcctagaactgttagagtaagtaggtggcgggatttgagcccagtcggctctgttgtgttttaatggcccccctgccatggtttgtgtaccagtatattttctgtactgttaccaactcgccatgccgacctggcgctgagctctccacaccaacatggcaagcagtgtggttaggatggtcccagccccctactcagcacaggaagaaaaaatgggtcccatgcaccagcctcagcaggtgaccaaaggagcatcgggaaaggtcagaacaggcttattcacaacatttcggcctatttttgaaccatagagaccagcatatatgtaatatagctcagttcttctcggttccgtagtaaaatttttgccggctcctgggatggaattgagtgggccaacccctcgcagggggtcttccacagggagctcgcctgtccagctctctgctgcccgccacgcctgtgctccaagggatcctgggagcatcaggcacgggcctgccccccagagggagagctcacttgagtgacatctatgcctccagcccagggctgggatggtgacgtgggaccactttacagcctggagggagggcctggccattctcagaggacaaggagaagggtgcagtttgcctaggcagacaactgccaggccatcctgggccggtgctggcagcccgggaggagctcagagcctatagttggtcacttggaggtgactccagaggctgctgaggctccctggagccctcagctgggggtagagcctctgtaccaccagggccccatgtctattttagtgcctggtggccctggctcatggagaggaacataaatccctctttttgtattttcaaaccgtgtcctcattgggaatgaagagtggtgtgttcatttggattttgggttcacccagtgtttgccgaactctgtttgcccagcagagtgctccacactgccagggaaggggcatcctctgtcctagtcctggcatcctgaggctaatctaaacagcaagtcctggggctacttgtcaccttccgcaccacctctgagattccacccctccccacagtggggaagcctccattctgccaccactgctgagaccccgacacagatctctccctttgcggaattcatagattcaagagggctttgagtttgacagccggtaagggcccttcccaccctcaactctgatagaacagcagtcagatctgtggcaggtgggttccttaccctctgagtccccaaacaaccgtggccttacaagaaagcattgattttcagttactgaaacagctgttgcaggtaactagagtgtagtttttttaagtgcaaaatgtgcgaactcctggggattttatgtgtgctcggtgtgatgtacacaaggaggtgagtgtgcatgagtgtgtccgtgtgacagagattgtgcagcccagcaattcccgatttccatctgagtaagaggcaggattgagaggggaccctctgagcccagggtgcaggaggatggcgaggagagatttaggaaaggagttgagcatgggggcaggaagagcttagacacatggattgtgccggtggatgaagtgaaatctcagggcatccccggcgtctagcacagcacctgtctcttagggagaacccagctgtattctccaagtgaaggaaggaaggaaaggagctgctgaatgacaatcctctctatgtccacgtcctttgggagactgtagagatgagctgcagccatctagacgcctctgagctttcagttctctctgttctcattctcttctctttctctttctatccttctcttctagggctttgaagaccccaaggacaagtgagtaatatgcccttccttattcctgctccctgggtctgggggatatctcccaatccaccttatcacttggtttctccacactccatggaaaatgactcctcttgcagtcttagctgagagtgaatggagcccaccctagccgtcaggtggtcagcagcagccccagacaggccagggcagcccagaagcccaggccacccagcagaaggacagagcctcagcactgcccattttatctccgtgacacgcttgtgcacgtgtgcacacatggctccctcaggaaagtgcagaccttacacactggtcagcagtgcctggcatccagtgccccgaggcaatgccctcttctccctccttcacttctggttctcaggactgtcagaaattccactccaggactgggctccaccctgagaaacagggtgttgaaggtcagcactccaagtctatgaaacctgcttctcaagagtgccctgagctgggtgaaagaaaccaggtgggccacagtccctgtggcagaaactggcagaaactctcactgcctgatctagggcttcttttcagaaggatagagctagagggtaaagagcagagcctgttagctgtagggaaagtccaactaaactgtcaatggtagctcacattgttatgctaatataatatgttaacagagtcagaaaagcctgtcagcaaggcccttcagcccgaaggggactgagacttggtcagttgtctgttcatctgtgcagttgttaagagcacggcttaggcttctggtctcagtctcagctcccgctgccctgattgggctgatggtggacagctgccaggcctctccgagagtctggggggatggtcggaagagccagccctctgctggtgcccctgtggtcagcctgtctcacgcccgtgccttctgctccccaggaacgcccaggagagtgcgaaccctgaggatgaagtggatgagtttctgggccgtgccattgacgccaggagcattgataggcttcggtctgagcacgtccgcaagttcctcctgaccttcagggagcctgacttagagaagaaggtacagcaccctgggtgggaaggaggcccctgtgctgaaccaggaccaggaggaggagggcaagaaaacaggagggctccctcatgcccccagcaccacggaaggggtggcctcagtttccccagctctgatgctgcactacctagagagatgcgagttctagggaggcttccctggttggaagggatacaccttgacttctctgtgccttcgtttcattatctggaaaatggggacagttaacattcccacttcgtagggtcatagtgaggatgaaa

SEQ ID NO: 94022 - DNA, 28403 bp, Homo sapiens
tcggaaggctgaggcaggagaatggtttgaacccgggaggcagaggttgcagtgagccgagactgcaccattgcactccagcctgggggcaacagagcaaaactctgtctcaaaaaaaaataaaaaacaaagatagtacttctcaaattttaagtgttcatagaatcacatagggatcttgttaaaatacagttcatgattcatttagtctgaggtgaggctcgaggttctccatttctaaacaaatttagatctatgtttcctggtaggtagaataaaagatgtccatgtcctaatccccaaaacctgtgaatatgttactttacagagcaaaagggattttgccaatgtgattaaattatccaggataatcttactatgggaagattatgctggattatcctctaggtccaatgtaatcagaggggtctttataagagggacgctggagtgtccaagacaaagaaaatatgccagtataatagatgtcagagggatgccagggccatgagccaaggaatgcagaaagcctatagaagctggaaaagtcatggaaactgattctcttctacagcctccagaagaaactcagacatgaaaacaattttagacttctaacctccagaactctaaattaataaatgtatcttgttttaagccactaattaggtttgtggtactttgctgaagcagcaatagaatatatgctcaaaagttataggctctctaatttgctacccttcatttattattttaacttgcataaaattgagtcttggataactctacattataatacagctcattagatgcttataaattaacataattcctagattcatttttgtttataataaacttgaaacaagtttattatttccataaggactgattatgtaaatcagtcctgggaggcagaggttgcagtgagcagagattgtgccactgcactccagcctgggcaacagagcaagactccgtctcaaaaaataaaaaaagaaaataatttgtcaatttatattcaaagactaaaatgttcacgcagtttgagtaaataattccatgcctggaaatctatactagagaaccaattcaaagtactgaaaatatttttcaggtataaactaaaatgtctatggctctatttttataagaacaatggaataggcaggatttagtaaacccttacgcattcacaaggtgaaagtttctgtagcagttttctttcttttttttttttttttttgagacggagtctcgctctgtcgcccaggctggagtgcagtggcccgatctcagctcactgcaagctccgccttccgggttcacgccgttctgctgatctcgtgatccgccccgcctcggcctcccaaagtgctgggattacaggcgtgagccaccgcgcccggccaacagttttcaatattaattattcagagtgtgtaataacttggaaaagggctttttttttcttttttgcttttagagacagggtctctggctatgttgctctggctggtctcaaactcctgggctcaagtgttcctcccatctcagtctccttaatgaagctgggattaggagcatgcaccactttataaaataaaatatttttatttatttatactataaaatattgtttaaaataaaaaatacataagtataaatatacaatataaaaatagattctagccaggtgtggtagctcacacctctgatctcagcacttctgtaggctgaggtgggaggatcacttaaggtcaagagttcaagatcaacctaggcaaaatgccatctctacaaaaaatactaagataagctgggcatggtagcatgaacctgtggtctcagctactctggaggctgaggtgggaggatcgcttgaggcctggacagggaggttgcagtgagccatgattgtgccactgcactccagcctaggcaacagagcaggaccctatctcaaaaataaataaatagtaaaaataaaaatagactctaacccacaaatagaattctatgtaccctaataatttggtttttattgtatttggaaaccttctaaaagctttattttgcaacatgatatacattattttatgatgttaaaataattaatagagaggccattagactgaggctgctccagcaccctgggttcctacagaagcaaaccaaaacccaactcagtgtattttatttgccatgcttccacattcaccctataaaagcctttctttggtgtgcctttaacagagtcccaaactgattcatgaatcactgtctgctcaaataaacattttaagattttactgtgccttagtttctcttttaacaatggtaatgatgtggaaacatttatctgacaaatgtttttgagaggtatcaattatgtaatattcactgacaaggtttacacctatgctggtattaaacagagaccataatcatcttctttaaataattgtattaatctaacatagtctttatgattatctaaaaatatttagatcattcttttttgtttgtttgtttttgtttttgagacagggtctcactctgttgcccagactggagtgcagtggcgcaatctcagctcaccgcaacctctgcctcctgcctcagcctccagagtagctgggattacaggtgcacaccaccatacccagctaatgtttgtatttttagtagagacagggtttcactatgttggccaggctggtttcgaactcctgacctcaaatgatccacccgccttggcctcccaaagtgctgggattataggcgtgagtcaccatgcccagccacatatttagatcattctaaagaatacattcatagaagaatcttgtttatagtattcaggattccttccttccttccttccttccttccttccttccttccttccttcttccttccttcttcctttccttccttccttcttcctttccttccttcgctccctccctccctcttttctttctttctttgagacggagtcttattctgtcacctaggctggagtgcagtggagcaaactcgactcactgcaacgtctgcctcactgcaacccagcctgggccactattttaaaaatataacatttgaagccaggcacggtaactcatgcctgtaatccctgcactttgggagggcaaggcgggcagaccacttgaggccagttcaagaccagcatgggcaacatggtgaaaacccatctctactaaaaatacaaaaaaaaaaaaaaaattagccagcgtggtggtggtgcacgcctgcaatcccagctacttgagaggctgaggcatgagaatagcttgaatctgggaggctgaggttgcagtgagccaagatcatggcactgcactgcagcctgggtgacagagcaaggctctatcttaaaatatatatatatatatatttatatttatatatgtttatatttatatttaaatatatatatttatattatatatatgagttgtgtctttaacagcaaacaaaagttagccaggggaaggtcgagaatgcaaagggaagagcactcacaaagccgaggtataaagatgtttaaggaagaaaaaggaacttgataacgttgggaagtaaataagtaaggtaaataggaacttaatttgaaaggcctacaatgctattctagggagcaatagtggtcattcattgatgaatcaaaagaacaattttgccttctctgctcttgtctccaggctgtggttacacagcagtacacattggagatactgggctccacatttagctggaagacatgccatgtcttcttgagttccctctaatcttcctctcccattgcgcataaaggatcttcaaaccttctccgcactcatgccccttgtcctaccacctccacagctccttctctacagaaaaacttgccttttatttcacagaagaaatgcaacctagaggccaaagcaggcagatcacttgagctgagaagtttgagatcagcctggggaacaaagtgagaccccgcctctacaaaaattacaaaaattagctggacaagatggttcatgtctgtcgtctcagctactcgggaggctgaggtgagagcatcgcttgagcccggcaggcggaggttgcagtgagctgagatcatgccgctgcactccagcctgggtgacagagtgagaccgtctcaaaaaaacaaaaccaaaaaacccaacaacaacaacaataacaaatcacacacagggttttgtgtcatgttaattttttttttttaaacagggtatcatgctgtcgcccaggttggtgcaatcttggctcactacaaattctcgggctcaagtgaggctcccacctcagcttcccgagtagctgagactacaggcctgcaccaccacgcctggctaatttttgtattttttgtagagacggggtctcactttgttgcccaggttgatctcaaacttctcagctcaagtgatccgctcgccttggcctctcaaagtgctgggattacaggcatgagccacctctccaggccatgtccatcctattaacatttggaagtgcctagcacagtgtactctttagaattgtggaataacaatgattgatgaaatgaaacatatacttgaagatgctactagggtatacgagattttttttctgacttagaactacatcaaagaaagaagggcctaagaccaaggtttgggaatgtacacaatgaattgctcaaaagagagttagctttagtaatgacaggaagaagctatttcttcaaccaaacagaatacacacagaaaaatttaaaagagccattacactggctggcaaaacagatgtggatattatggccctggtacacacggagtttatagtcaggtacactgtcctgtcacaacgaccaatacgttatcgtatttacagcgttttggagtttctgtccatctctgtcaatataatacactttgaaataagtttcttacttagaatccctagcagtgtttgatacacagttggagctcaataaatgtttacggagtgaatgatgaggcacaaaaggaatttgttgaattatttgttaaatgaatcaaataattttctaggattcacgggctgtcttctgcacgataagcttcattctgtgggtctgagtttctcctggttctcaattctgtctttttgtggattatctactttgtagctggagctttgtatctgtttaagataattattcttctattcctttttttttttttttttttttgagacggagtctcgctctgccgcccaggctggagtgcagtagcgcgatctcggctcactgcaacctccgcctcctgggttcacgccactctcctgcctcagtctcccaagtagctgagactacaggcgcccaccaccacgcccggctaattttttgtatttttagtagagacggggtttccccgtgttagccaggatggtctcgatctcctgaccttgtgatccgcccgcctctgcctcccagagtgctgggattacaggcgtgagcctccgcgcccggctcttctattcttagtagaagcaaccagtagccctagcgaaaccagacgttaattccattctcgcagttcttttccccagggcaagcagcaaaaaatgcattcccacaaaagagcaagctcatccccaaatcccgggtttcccacccccacaagcttcaggaaaacaggagcgaggcacgtgaatacttctttggacctcagcgatcccagaacctaggctactaaaacatccataggcttaacctcatcatataacttaaacagccttcgcaacaccgagagcaccacaccaacaccttcttatccagccctggttgggacaagggctccaactccagactgcagtcctcggtagcgcggtgtcttctgggatctgtaggctcccgcggttcggccttcctccctctgtgactccaattcccggcagtcagtgggctccaaggtccgccctttttctggaggaggagctcagagcgtacgggagggggcggacccttgcccctccggcgcttgggccagagtggtgcgggcggcgcgtggcggcgatccccacgtggtggctttctcacgctagccctctttggtcctccttgacgtcccgggcctgtgggcccgctttctgccgagatgccgaaggtcaagtcgggggccatcggccgccgccgcgggcggcaggagcagcgccgggagctgaagagcgctggaggtgcggatccccgcgaggaagctggggtcggtcgggtcaggtcttccggcaggacytagcctgggktgcrgaccaagacctgatcggcagaggccggtcaggacgcgctcccgtgagcgcggaaggcaggggtgggtccccgactcggccgcaggccctgcgcgtcgccgctgacttcctttccagctggaggatgaacttataaagagtttgtcagtcctggcgtgacgtttcgtggccctggttggcgcagaaatcttccccatacccatgcagctttcttctctggkactgcctaatatctaatctcagtaggaaaattaatgctgtttcgtattttcttacaggactcatgttcaacacggggattgggcagcacattttgaaaaatcctctcattattaacagcattatcgataaggtgggtgtggaagaggaaagggagagagttgttggtttattaattttattcctatgaatacataagcgyagaaagtctgcctgccgtaaattagatgctctgtaaatatttgttgaatgaatcaaataattgtctaggattcttgggctgtcttctgcatgataagcttcattttgtgggtctgagtttctcctggttcccaattctgtgtctttttgtggattatctactttatagctggacctttgtatttgttcaagataattattcttctattyctaatcacctttttgatcacttagtttttatgtactccatctatttatgtctaaactacacattagaaagtttgttccccagaaaaacatatagtactacatataaattatttggtgtatgctagtaccacatataaattgcttggagtattactgctytctgagttattgatgttctcttatggttatggatgattgggtgttaggaagtgaaatacacacggtgcagattacacttatggttaaaagcaaggaaagcatcctggagctgtagaaagagcattacatagttaaaggatcttgtcaggcttcgtgtcatttgaaaactgagaaaaaaagaaagaagggtcatgtactattttaacctttttagctcatagtttcctttgagcatctgatgaaagctatggccgtagaatattagagctgtgtgcagacattcaattttgtgtacagtttctgctcttctgcatccttgaaaccatacatgggttgaaaattgaaaaatcttcgcccaacacgtacagtcctttcccatttgaacttgttgatacgaacagagaaggtaacaagaggctattggaatatttccagatagaaagcagaatgccaatcccagaaatgctgttgctgcttttctgactcctaaagttgaacagtattcctccaagttaggagaggtcttagattttcatttgcaccaaatgttattgaggtaattttgttaaccacgtagatcatgaagaaatctaaaaatggagtcagattaagagctcttatcrgagcacatatgagtaaagatgttcaggtgtaaattaacttctgtgttctgatgttgccagaagagctaaagtgtttgtgcttgcttttaggctgccttaagaccaactgatgtagtgctggaagttggacctggaactggcaacatgactgtaaagttgttagaaaaggcaaaaaaggtaraaaggggatttaatgtttggtatcacaaatgactatgttagcaagctcagytggtttacaatctaartatgttttaactaattgctattattttagtagtaactcctgatcccttgttggaaattttgtcttagaaaatatgagatatttcagccaggcgcggtggctcacgcctgtaatcccagcactttgggaggccgaggcaggtggatcatgaggtcaagagattgagaccatcctgggcaatatggtgaaaccccatctcaactaaaaatacaaaaattagccgagtgtggtggcaggtgcctgtagtcccagctacttgggaggctggggcaggagaatcacttgaacccggaaggcagaggttgcagtgagccaggattgcaccactgcactccagcctggtgacagagtgagactctgtctcaaaaaaaaaaaaaaaaaaaaaggaaaatatgagatatttcagtgaggaaaacagaaaccacattaggtatttcaacagggaattttttttttttttttttttttttggagagggaatttcacactgttccccaggctggagtgcagagatgcagtcctggctcacagcaacctctgcctcctgggttcaagagattctcctgcctcagcctccccagtagctgagaytataggcacctgcccccacaccagctaatttttgtatttttagtagagatgcggtttcaccatgttggccacactggtcttaaactcctgacctcaggtgatccgccaactttggcttcccaaagtgctgggattacaggcatgaaccaccatgcccagcctcaacagggagtttaattaggaaggaaatacccaacgcctcccctttgtaccctataatgctggtgcctttcactggccaattccaaccagaagttgaaaggtaagggagctgaactgcattatctgtaggatgcagagaaaagcggataatagatctgggagggcctttcatggtggctcacacctgtaatcccagcactttgggaggctaaggcgggtggatggcttgagcctaggagttgaagaccagcctgggcaacatggtgaaaccccatctctacaaaaaattggctgggcatggtggtgcctgactgtagccctggctagcagggaggctgaggtgggaggtttacctgagcctgggaagttgaggctccagtgagccrtgatcctgccacttcactrcagcctgggtgacacagtgagaccctgtctcaaaaaataaaaataaaactaaagatagatctgggagccaaacagagtaagaaacacattgtttaccatgtaaacagggtctatatagaagtagggccaggagctgtggcccacatctgtaatcccagcactttgggaggctgaggcaggaagattgcttaaagctatgagcttgagaccagcctgggcaacaaagcgagacccaatctctataaaaaataaaaaggctgggcatggtgcctcccgcctataatcccagcactttgggaggccaaggtgggaggattgtttgagcccaggagttttgagaccagcccrggcaacatagagagacccgtctctattaaaaataaagaaaggaaattagcctggtgtgctggtacacacctgtggtcccagctgcacaggaaggtgaggtgggargatcccatgagcccaagacttcgaggcagcagtgagctatgatagcgccacttcactccarcctgggcaacagagtgagaccccatctcttaaaaaaaattattttttaataaaaataaaaagtcagtgaaacctcagctgaaattgcaataaaatttcaatttcggccttatttgacatccattttcatttacttgagaagttatctatgccatgtattgtgtatctcagtagatgtgacatactaacagtaagagcaattgcattgtacgctcttctctaacaacactgactgcagagacatgtagtgtatttttttcatcatctgttgaattacaaagcatggagacagatgaaacatgattctattgattatatgagtagaactctcacataatctggttgtctacttttctgggtggtggtgtttgtttgtttgtttgtttgtttttgagatggagtctcgctctgttgccaggctggagtgctgtggcgcgatctcggctcactgcaacctctgactccctggttcaaacaattctcctgcttcagcctcctgagtagctgggattacagrcacgtgccgccacgcccagataatttttgaatttgttagtagagacagagttttaccatgttggccaggctggtctcagtctcctgaactcatgatccgcccacctcagcctcacacccggcttttttttttttttgagatggagtctcactttgtcacccaggctggaatgcagtggcacagtcttggctcatggcaacctccgcctccagggttcaagcaattctcctgcctcagcctcctgagtagctgggattacaggcgcccaccactaggcccagctaatattttgtgttgtttttgtttttgtttttgtttttgttttgagacaagagtctctgtctcttgcccaagctggagtgcaatggtgcgatctcgactcactgcaacctctgcctcccagtttcaagcaattctcctgcctcagcctcccgagtagctgggattacagatgcccatcactgtacccagctaaatttgtatttttagtagagacggggtttcgccatgttggccaggctggtttcgaactcctgacctcaggtgatctgcctgtctcagcctcccaaagtgttgggattacaggcgtgagccactgcacctggcctaatattttgtatttttagtagagatggggtttcaccatgttggccaggctggcctttaactcctgacctcatgattcgcccaccccagccttccaaagtgctgggattacaggcgtgagccactgcacccggcccatttttgtttgttgtttgaagtatgcgartataattaaaggaatattgatggtagaaatgggagaagaagtttgtcacataaatcatgtaagagttcctgttgggataacaataaaagatttatattccataattaacctaaataatttttattttttttaaattaggttgttgcttgtgaacttgacccaaggctagtagctgaacttcacaaaagagttcagggcacgtgagtatacataatagaattaaagtgcatttcaatctcatgaaacaacattcttyttacatttcttcttttctcatcaggcctgtggccagcaaacttcaagtactggtgggtgatgtgctgaaaacagatttgccattctttgatacttgtgtggcaaatttgccttatcaggtatgtcctcacattttcaggaacatcatactaactgttcctctgatgtgtctttcccggaaataactagttaattctcttacagatctcttcrccttttgtcttcaagctgttgctacatcgaccttttttcaggtttgtgacaaaagactagagttactgccaaattttgaaagacttacagttcaggtggtgaacatagccaaaaatgagtcaggtcagttgaaaaactactgaagaatttttgtagaaaatgttgatttgtatggaggtctttctctctttaattgagaggttatttgggggtagtgtgctggaagtcctgcttctgagaccagacagcctttccctatttttgaatcttcctgccgttaagyctaggttagaatttttattaccttatgtctagacaattgcagtggtttcctaactggtctctagtataagaggtcttcaaaaagttcatggaaaatgtgtattatgaaaaaaacttgcatggatttcaaaatttttttgcaccaaaataaactctgtactaactgagcaggatctagtgtgaggcactgagaaggataagacatcagtttgaaaagagcccctatcagagcaacatgaactctgctaaaattcaagtaagaacaaacatccaatttatggtgaaacctggttggaagaatggtgaaatcattgatgctttacaaaaagtttatggagtcacacctgtaatcccagcactttgggaggccaaggcaggcggatcatgaggtcaggagatcgagaccatcctggctaacatggtgaaaccccacatctactaaaaatacaaaaaactagccgggcgtagtggcgggcgcctgtagtcccagccactcgggaggctgaggcaggagaatggcgtgaacccgggaggcggagcttgcagtgagccgagatcgcgccactgcactccagccttggcgactgagcgagactccgtctcaaaaaaaaaaaaaagtttatggggacaatatcccaaagaaatcagcagtttactaatggataactcattttaagaagggctgagacaatgttgaagatgaagcctacagtggcacactggccatatcaatttgtgggaaaacattcatcttgtttgttccctaagtgacgaggaacaacattcaacagcacaaacaatagccaacaccatagacatcacagttggtttagcttacacaattctgactgcaaaatcaaagttaaacaaactttgtacttgatagatgccaaaactgtcataccctcttttctgaaagattttatgaaaaaacaaaacaaaaaacattgtactcaaatcagctgcagataaaagcagagcttccagtggaaattttacataactgggatcaagatcctgaaacatggctgggtggagtggctcacacctataatcctagcactctgggaggccgaggcgggcagatcacttgaggtcaggagaccagcctggctaacatggtgaaaccccatctctactaaaaataaaaaaattagctgggcattgtggtgggcacctataatcccagctactcgggaggctgaggcaggggaatcgcttgaactcaggaggcggaggttgtagtgagccaagattgtgccactgcactccacactccagcctgggcaacagagcgagattgtcaaaaaagaaaacaagatcctgaaacatttcttcaaagaattacaragaattgtaatggagatgaaatatggctttaccagtgtgatcctaaagacaaagcagagtgaaagtgatgcctaccaagaaacggagtggctccagtcaaagcaaaagcagaccagtcaagagcaaaggtcatagcaacagtttttttttgaatgctcagggcattttgcttgctgactttctttaggaccaaagaatgaaaacatctgcttattacaagagtgttttgagraagttagctaagatgtagcagagtaactcctgggaaagcttccccagagattcctccaccataatacttctactccttcctctcatcagacgagggcaatttttcgagagtttcaatgggaaatggttaggtatccaccttacagtcctgattgggccccttctgacttctttttattttatgagacagtcttgctctggtgcccgggctggagagcagtggtatgatctgcactcactgcagcctccacttcctgggctcaagcattcctcccacctcagcctcccaagtagctgcgattacgggcatgtgccaccacacccagctaattgttgtattttttttagagatgggtcttgccatgttgcccaggctgtctccccctcctgagctcaagtgatctgcccacctcagcctccccaaatgctgggattattacaggcatgaaccatggtgcccagcccttctgatttattttcgtttcccagtcttaaaaaatcttgaaagggcactcttttttcttcagttaataatgtaaaaaaaaaaaaaaaaaaaaaaaaaaaacctkcagtgacatggctaaattccccagagcctcagtttttttgatatagactaaaatgctggtatcatcacttacaaaagtgtcttgaacttgatggagcttatgttgaataataaagtttatgttttttcttttttttctttttctgagacaggctggagtacagtggtgacatctcaggtcactgcaacctcagcctccctgggctgggctcagatgattctcctacctcagcctcttgagtagctgggactatgggggtgtaccagcatgcctagctaatttttgtgttttttttagagaaggggtctcaccatgttcagcccaggctggtcttgaactcctgagctcaagcgatctgtccgccttggcctcctaaagtgctgtggattataggtgtgtgccrccacaccagccttattttatcttttaattcaatatttccatgaactttgaagtcactttctatattatatactagtggctttcaaactgcaagtcaaaaactagtggttataaaattaatgagtcatgaccattctttttttttgtaatcacatggaatagaatatatcacagggcattgcatgtagtccaggtgattatggyttcatgaaacttttgttttgaaatacaatataaacacatatacatacagacatttgtggcttggcttgcaatgccaaatgtatttttagtgtgactcattgtcaaaagtttgaatgtcaaagtgtagctttgaagatactcttctgttcgttaacccctacaaagtcttccccattgcctgctgaataaaaagtctacatcttttggctgggtgtggtgactcatgcctgtaatcccagcactttgggaggctgaggtgggcggatcacctgaggtcaggagttccagaccagcytggccaacatggtgaaacactgtctctactaaaaatagaaaaattggccaggggtggtagtgtgcgcctgtaatcccagctactcgggaggctgaggaacgaggatcacttgaacctgggagacggaagttgtagtgagccgagattgcgccattgcactccagcctgggcgacaagagcgaaactccgtctcaaaaaaaaaaaaaaagtctacatcttttaacccgtcaaatcaaggaaacattgaacgtcacaatctgcctcttcagtctcacctcttccttaaaggtgtttgctaccccataaatatattactgctactgaaacaattttatttcactttgttttcatagaagagrtgatggactagtgctgatttgaaacatctcatccagtcattaaaggcttatatttgcaagctatcttgccatgaggagtacagcaattataaaaacaaagccagctctctcattctgtggcaataaaaaaaaggctgaatgtgttctcctaccttataatcagctgccaawgctttgctatttctctcccaagaaaattcattgcagttaaaattcatttatagttgacaatgaccattttccttattcctttctgctttcttttcaggtgtgctatacttatgtttcaaagagaatttgccctccgactggttgcaaaacctggagataagttatactgcagactctcaattaatacacagctgttggcacgtgtggaccatctaatgaaagtaagtgaattttgttttctttctcttttttctgagatagaatctcactctgtcacccaggctgcagtgcagtggctcactgcgatctctgcctcccatactcaagcaatcttctcgagtcccgagtagctgggactagaggtgtgcgtcaccacgcctgactaattttttggtatttttygtagacacagagttttgctatgttgcccaggttggtcttgaactcctgggctcaatgatccatctgccttggcctcccaaagtgttgggattacaggtgtgagccaaagcacccagccagtgatttttattattgaaataatctagcttaattcatccttgagcatycagttgtgccttctgtgaggatagcatatctggttactaaataaaagttgcctttgtgagtactacttaaatactttttcattaacaggtgggaaagaataacttcagaccaccgcccaaggtggaatccagtgttgtaaggatagaacctaagaatccaccaccacccatcaattttcaggtgaggttaaaatactagctcattcaataaaggaaaaaraagtccaggcgggaagatgtgtgcctrtaacagcagaaaaatattgaatcaacctaaatattcaaacataggaaaatgttaattaggacacatccctgtgctgaagtagatggaataatttgatgcaaggtagttttgaagtgagacccagtctcaaaaaaaaaaaagaaaaaatggaataaaactaggaaaacaaggtaaaatgaaaatagttgttttaaartagtattatgggtaacatcttttcattgtaattgttttttgagatttaaaaacaagaaagaagaccacttgatataaaaccttactacagccacattagagaaaaacgtgattgtgtgtgtggtcaactggtggtaaatggagtggtttgtcaataactccttcaaggaggtttaggtgtgttacacaggaagtatctgaagtcatgtctgttttgaatcttatttttgaaaatgatacttagatttaaataaacgccatgttctttgttcagatgtgggaccattttgtttttccttccctttctttttttaagatggggtttcactatgttgcctaggctggacttgaacttttggtctcaagcgatcctcccacctcagcctcctgagtagctggtactacaggcatgcagcactgtgcctggctttattttttcaaattaaaaaaaaaaattgtcatgctttgtcaaaaaaaaattctgaggaaaagacatattcagtgaaatgcgccaaagtgcaaaaatcaaatgtatgtcttacttttgcatgtgtgtgccagccagatcaagattacagaacattttcttcacttcagaaagtttccttcaattgtatatattaaaagayaaaataatacctagtgggcatagacaagaacaagaagtttgtaatttgaagaaaatgtctatcttctatttcaggaatgggatggtctagtaaggataacctttgttaggaaaaacaagacactctctgctgcatttaagtaagtattacactaatttctaatgtataaagggccagtgctccagatactatgctagaatttggtccttttcctgagcagctaccctaaagcataaagattatgggtccagacaaacttcaccttttaaactatctttagagcttgggaggctctaaagcaaacttaatgaagaaagtttgctggagttgagagtcagatcacattttttggcaaaacaggaaaacrctcccaaactytgaccatatatctgctctagttttttgttggaaaaatgaggtgatgatggaccccttccacacttgtgaaggatatgtgtcatgtaattaacctgggaaaatgcagctcatcaatttggggttcaagggtaaaagagaggtgagacacagttttacagggcttggagatttttttttaggggattttttgtggagagtctagaacttctctaagaatttaagaggtattaggattttgcactttaaatatatttagtgtttgcttcrtaagtttaaatattcaacaacttttaaaattccttaatttcaccatacagaatatagatttaatttcatctaaaatgaaattattgcttaaatggcttatgtattagttaaaaaaaagtttaaaaaagtaagaaattactctgactttggaataataacagtggcatcacttctttatgctatagatcaagtgcagtgcaacaactcttggaaaaaaactacagaattcactgttcagtccataatattgtaagttagaaaatgttcctgcagtttcattgatttgttttcttttaaaatgtccatttttattcttgttgatctagcatgagattattttgtacattccataagatccttaaaagacaatatataatgtataactagcacaattttgacttgaattctgacaggtcagtgctgctgtgtatcctgtgaaacagatatgagcaactttgattactccaccctgtcctctaactactgacagttgtttttagccataacaagaatcagattcagcagttacaggttcctcaaagctgtagatatgtgtagcttgcacaacttaaaataattgtgtagtttactgtcctctgaattgtgaccacgtcttgtttcttgctcacatagcagttacaaatatagttattactttctttgtatagaaattgaaataaagttcatatggctcaatagcagattyctggttgtgagcctcatgcgtatcatttgtgtaacagtgtgtgcgatgtgatgtttgctatctttttagcttccagtttaattagaacagagagagaaaggccaattttctttttattttttatgactcagaacctatatggtttaatgtatcacaatactatctccattttctcttttatgggcaaaaagtcattagataatctgcctaagtataatagaaaaatattaagctagattaagaaaaatatttggataaaatatgtgaattaagtgtaaaatccttttggataaaatatgtgaattaagtgtaaaatccttaatattcccaaggcttgggcaggtcacctctttgagaaaaatgaggtggttaaggtcaaatctgtaggaagaaaatgcattattttgaaaggagtaacaattgctttaaaatttaatttacagttgtaattatttgtgaagtctgaaactaataactatttcagaattttaaagaagaaaatggctaatatagacaggattactaattcaaggtattccaagtttttgttaataaagatcagccacttttaattagagatccaagtcttaatgtaaaaatcaggctttccaaagtctcattaacagatatattaaaggtgactattttatgacttactgaactaaaaaaaagagtcaaggtgacctcattaaagatatgtcgttcatttattctgaatcttatattgatagataataccagaagatttcagcatagcagataaaatacagcaaatcctaaccagcacaggttttagtgacaaacgggcccgttccatggacatagatgacttcatcaggtaattacatttttgttttcctaagtgtttacatttctttactgtgacaccttcaraytggagattttaaaggcttttaagcggtataaggtgctacctgggagagttattgcatagcacttccatggcatggaatagtatttggtgtagaagatggaggctagttagctgcagcagaatgaacattttctttaagaacagtagtaaagaacagtccgagccagaagattgcctttgtgttaatgtggtgtgcaggttccaatgtggtgtgcaggttcctcccttcctgctccttccccaactctcattcatagtcttagtcttaatagcttatccctccaaaatagtccataaggtagaaaaatcataatacatgtaactggatctgatttttaaaatttccttactgggaatagctgttgttaaatcaatcttaagcatacaataatgccagttagaatcctacctggttatccatttaggaataatacagttttgtagcctgaagcaagttctacacttctcaagtaaaaagctgtcataattatctaggtaatttagaccaaaatttgttttgcttgaattaagcaagtaagtcttatgaaaacagaataaggcttcaattaattacccaggtaattactaacctgtacttactgtttttaatcattaagatgttaactttcagaaggtcttgcctatttagccaattcacttttaaagcttccatgttctagaggctgaataaaaaatgagagyagattgttctaaaagtcattggtttgactttttctaagctggaaacacagttctatataactaagacaaatggagtttatattttattggctggctagcagtactactgagtcattttagatgttaatcctaggcattgaatactattcataaatatctactttgcttttttagaaatttatctggacctgtttctatgggccagcctaaacataacctcaggtctaaagagaaatattttctctttttcttcattttcactaaatttcctcaaagttattgggcatgtgcagtttactaactagaatctattaagtacataggtatctacagagagaaacaatgtgtatttaatttgaatataaacaacagctcaagagaggaagaaggggcatgtaagattggtttttcatctgacttctgccaattccaaacagcttcttgttcagttaccttgaaacaaatgccagtgagttcttaggcctgggataatgaaagtctaagataattttagtcarattcattacgacataaaggctctaatgaaagaggcaccaacatggcatggttttaaccaatacatatcttataaatttagtcagacaataacatttctttttttttttttttttttttttttttgagacagagtcttgctctgtcacccaggctggactccagtggcacaatctcagctcactgcaacctccgcctcctgggttcaggcaaatctcctgcctcaaccacccgagtagctgggattacaggcatgtgccaccatgccaggctaatttttgtatttttagtagagacggggtttcaccatgttggccagactgttctcgaactactgacctcaggtaatccacccgcctcagcctcccaaagtgctgggattacaggcataagccactgcgcccagccagtaacgtttctttaataactagtattaggagtgggtgggctctgtaagcatgctgtattcatgttttagtattaatggtatagaactatataccgttatgtgctacaaattagcttttcagtaccattccattttgatttcttttttcagattgctacatggattcaacgcagaaggtattcatttttcctaggtatttggaaaacagaaattttcaaggtcaagaaaagaaatgaattttgtattttttgtatttgagaagataatgcttttgctttactgagacattatttacttgactatttttggttcaatactactactgttgtcaccatttatgattctgaattttaaagttggaaagttctaagtatcaaagtttttaatatataatgctggtccaatctattcataataatcttcaagttcaggagccgcagagacgcacaactttacacttatcatttctaacagtttattgtataaagatgttactcttctatttactgttatatactgtaaggccttctttaggcctttagctctgttcctccagtaataaaaaagttaaaatatgcttcactagtcacacattccccataccatttcgtgttattcacattccccgtaccatttcttgttattcacatgtacagtaaaacaattgtttcttaaattatttttattttggttctctcattctcttccctatttatcctatacagtgtctgttacgattgcctacctctttcgctatcctatagcgtcagagacttagggttctgggtaagcccaagtctgctactgccaccgtgcagtgccaggcatattaaagggcatgactcccaacatgtaaaatgaggaagctaaactggaatgaaattaacaataaaatkatctttttttatggttcttagggagataactataggcttagcaaaatttcagagggttttgtaattgaaactggtttcaacttcagaaaaacagccatttcccrtaactacaggttcccagtattcctatgatttctggacaattaaaatttccagttcctttttcatataccyggtgcttagttttaagctattttaaaactgtcagactgagaatttcaatagatgtcataaactagttttattagctactatgtttaagtcaatataatactaagtgctgttaatatactataatagagttatagtagctattttgtttctataaaaaattaataaaaatatctttattgatatttggctttttttaatacctaacttaatagaagagtgtttccaattaatttaacaaagccagattttgaaatctggcttcaaagtcatagtaaatgttactacataattaaaataatgcttgttcttaatgtataatccagaacaaaggcatcaagctgcttttgttaaacaaatatgaaatatwcattaagartagatttttttgtttaatttcacaaaactattttgcagagttcacttgtatcatctctatccttatagtaaaaattttaagatttawctcggctttctcaggttatttccctctacccctatgaactgctgagttttagttccttttctggccttcagttttcactatctgtaaagctgaaggactgtattatattacctccagtatcttttctggtactaatttttaaaatacctgatcagaatgaagccatcatagtgtaaggcagcatatttgtctataaggagactttccaaagacagtacccatccaatgcaaataataaatttgaagctaatcatctgttgtgctttaaaatgagcaaattcacatgtctttattgccctttgaaagttggttaatctcaaaaactaccttttttttaaatatcctttgcaaggtcaattgtaacagttctccatccttcctcttccctttgaaataaacacaaatagaatatatcttacagctgcaagaaaacctgagtcctttccaaaacaaaggtgactgaagtaaattatctctaaaacttattccatagacttcatttattaataagcatattgtgaaaatctacatttgttttagatttcatgtttacagagcttttcacaattgtattaggatctttcacaactactctctgggttttatgaacagtaaagaatctggctcatgtgaccctctattcatagctcccctttggctcctgtgaaggagctgatagttccctggagtaaataaatcaaaacaagatatccttgggagatttttagctgttaatctactcctggaccccatcctgggaactgagggaaaactcctagagagatatacaaatctttgaacaaaatatttacatgaaaagtggccagttttcttccttggagtagcaatctgtaaaaataagtgctgctgtttaaaaagtagcatgccctacaccataccaatgtattagtgagaatttggcgattctcaccaaacaacaatgaagtttcacatttggtactggatggagcttgggttagatctgccttttaaggcaaagtcaactctttcaacttaattctttttcaagggagtaatgtactgtctacacttggcttaaactaacttctattatggactactttcaatgtacatgtaaatgttcatgcatcagaagccaatttcttttaacagtacatagaaaaggtatattttggggtgctaatgaacacttcaaattaagtaatgatattggtaaggatcaaactgcactattagtcttgttaataccacactggcacacacactgcatatatatgtattttcctaagataaaactcttctcagaatttcattactttttattatacaccaactagtttatattgtagttctttacaaagaaaatgctaagaaaaattataatcacatgttatatggttttaaaataataattccagatttctttacatataagatggaatggtccagcagctatatccactgtcacagactttagttccgttcaatgatatggcacatcctgcaaaattaactagtcacacacaaaaaatgtctcaaatacagtaaaaatgtacacacaaaggtaatttacaatgacaaggaatgtaatttttcttggctgtgcttcagaaatttagggtcagtagccttaatcaaggcacaaagcaggaaaaggtgagcacagctgtctctaggagtgggcaaggtatgtacaatcactgatgaggtatgcatgcacgcaaaggatttaaaactgctcagtctcactacaaaaattgaactgagttaaaaggaaatgctgtggcttccccctactatctggctctggattgagtccacagtcttacttcatcaaatagaaaataaaactgacaaggatctccaaaagtaaatcactatttgtgtaaatgaaacaaaatgcttcattaatcccagttcttggttgtgcctcctggactagaagcattttgtagacaaaagagtgtttcacaaaattgaaatgtaattcaggtgaaggacaaaacattttccacagacacttaaaattccaaactttcaaatggcccttacagctgaaccgttgtatgttacagtagtgagggttctgggtatcctttagcagcaaatgccggtttaaagggcacggggtctcttcgggttgatttgcttgctggcttgttcctcctcttgtagagctgcacggaaagatttcactttatcttggaaaaagaaaagaaagagggaataagtattgtattacacgcagtaagagtttacaactttatgggttcaatcaagtcagctgtgttatttcctaacagtaactcagtatttttccttttgttctttgttgtctagaaactcggaactaaatagaatgctcaactattgcgaaagttttttgttacagatttccagaaatacctgtttttctgtatctttcaatagctttctgttctgtttggcacatttacagttctctgttttaatttattggaattcctcctagagtataggcaggtttcacattgtaaaatacatagtctacctttttttttttgagatggagtctcactctgtcacccaagcttgagtgcaatggtgcgatctaggctcactgcaacctccacctcatgggttcaagcaattctcccacctcagcttcccgagtagctgggattacaggcgtgcaccacccgctcagctaatttttgtatttttagtagatacggggttttaccatgttggccatgctggtctcgaactcccaacctcaggtgatctgcccgccttggcctcccaaagtgctgggattataggcatgagccaccgtgctcagcaccccctattttacctttttaaagctatgaacatgtaaaatatatttgaatttttagaaatttacattttgtcctcactgtgaggaagggggattgtgaaggggggatgactaaatgatatatttcttgattttacgcattttctggtcatgtactgctctagagtcatgtaaaaactagaaataggttagtaaattgtcagacaaattacatgcagctgtgaagataagctatctttcaataacagtggctctcaactggatatgatttttggcccccagcgggcatttggtaatgtctagagacatttttggttatcccaactggtgtggtgctactgtcatgtagtggacagagaccaacgatgctggtaaatattgtacaaggcacaggataacactcctcaacaaagaaaggcctagccccaaatgttaacagtgtcaaggttacgaaaccctactctgtagacttcagaataaagttggaatctcaattttcctcccctttttgaaagtacagtgatgtttaaaaagttaacttttttgaaattttgaaatgaatttaagaacttctagatttggtgctctcaaactgttactgttctgttttttttgagatggagtctcactctgtcacccaggttggagtgcagtggcgtgatctcggctcactgcaacctccgccctccgccccctgccccgggttcaagtgattctcctgtctcagcctcctgagtagctgggactacaggcatgtgccaccatgcctggctaatttttgtatttttagtagagacaggatttcacaatgttgaccaggctggccttgaactcctgacctcgggtgatctacctgcctcagcctcccaaagtgctgggattacaggtgtctggcccaaatttttcttataaatcccaaatttatctctgggtggttaaaaaaattctaaggactgaataatgcaatatatctagatagtaatttcttaaaagttatggatatgcttgatacacatgaaatttgagaaaaggaaaggaagtcaattaagttgaatgctacaaagaaaaaataccagagtgcattaggatctgtcttctgaataaaatggatacagaagctgattgtgaattattgcagattagaaaaatgatcaaaacaatttaaataaagggttgaatatgaacaatatgagaaacaaatgaaaattttagttcaacagtcactgctgactttacaaaatatgatttcaaataaccaacttcataaccagtcagcaacatatatgtgttgaacatctcatccaaaaatctggctgtgcaggccgggcgtggtggctcatgcctgtaatcccagcactttcggaggccgagatgggcggatcacaaggtcaggagatcgagaccatcctgactaacacaatgaaaccccgtctctactaaaaatacaaaaaaattagccaggcgtggtggcgggcgcctgtagtcccagctactcaagaggctgaggcaggagaatggcatgaacctgggaggcggagctttcactgagccaagatcgctccactgcactccagcctgcgtgacagagtgagactccatctcaaaaaaaaaaaaaaaaaaaaaaaaaaaaatctggccaggcatggtggctcatgcctgtaatctcagcactttgagaggttgaggtgggtgcatcacgtgaggtcaggagttcgataccagcctggccaatatggtgaaacccggtctctactaaaaatacaaaaagtagccgggtacagtggcacacgcctgtaatcccagctactcagaagcctgaggcagaagaattgcttgaacctgggaggcggaggtcgcagtgagctgagattgccactgcactccagcctgggcgataaagcaagacactatctcaaaaaaaaaaaaaaaaagcaaagccaggctcggtgcctcacatctgtaatcccagcactttgggaggccgaggcaggtggatcacctgaggtgaggagttcaagaccagcctggccaacatggtgaaaccccgtctagatacagaagttagctgtgcattgtggcgcgtgcctgtaatcccaactactcgggaggctgaggcaggaaaattgcttgaacctgggaggtagaggttgcattgagctgagatcgtgccattgtaacccagcctggacaataagagcaaaactccatgacaaaaaaaaaaaaaaaaacctgaaacctgaagtgttccaaaaatcccaaacttttggtataatgcaaatattcaaaaatctgaaaaaatctgaaatccaaaacacttcttgttcaaagcttttcacataagggatactcaacgtgtatatacttcaaaacatcatgttgtacctattacatacattttaatctgtcaactctttaattttttgagacaggatctcactgtgttgcccaaaccagagtgcagtggcgtgatcctagctcactgcagcctcaaactcctgggatcaagtgatcctcccacttcagcctcccaatagctgggactacaggcaggcaccaccatacctggctaatttttaaatttttaaattattttttagagatgggatctctatgttgcccaggctgggatgtcaatttaaataaatgaataaatttaaaagaaaaataacccttcaaaacaactaatcaacatcacagagggcctccttaaaaaaattaagcagcttatttactgccccaaattaggaatttcattctggtttatgttggattgcgtgtacacacacatccagatggtcactcacacctaaacaaagccaacagtgtgcaaatgcctaagaaattaacacataaagaaatacatagctgaagctacacagataagctaactaaaaaaccaaaaagacacgacttagtaggtaaggcacatgcttcccttcatgagtaaggtacagaggatagtcatcttgacacctccttcatttaaaaaaaagtggcagaggccaagtgtggtggctcatgcctgtaatcccgccattttgggaggtcaaggcaggaggactgcttgagcccaggagtttgagacagcctgagcaacatagcaagaccccatctctacaaaaaattaaaaattagctgggtgtggtggcttgcgcctgtagtcccagctactcaggagactgaggtgggaggactgcttgagcacaggaggttgaggatgcagtaagccatgatcacgcccctgtgctccagcctgggcaacagaatgagacccgaaaaaaggcac

SEQ ID NO: 94023 - DNA, 14801 bp, Homo sapiens
ttgaacactggtgaggcataaaatttcaaatttctcatttgttattattctaaaaattgtacccttgggcactgaatcttggtaaagttcgggtgagtaggaggcaggactttcttttgaaaataacgtttttgaaagtgggggcatatagaggttttgacaaaggtgagcttagagttgcccactgagttcacagttccactggtggtcacttgcctaatgttcaaatgtataataagaattgctatactagtaggttggatttttgatttctgtagttgctagcttggacttggttagagggattcttcttgtgctgggcctatgtgtgcccttcacttatcaccactctattcatactcccaacaaaccagcactggagttgccagttatttggtgctttacctatgataaatatgaatttttgccaattcaaagtatatgaagacatatcattgatttcattgttagtccctaattaataaactgattaatcacttttgggtttatgatccagtcagaactttgttcatgtactgcactcattttgtcaagtgatatttttcattagattcttctttagtatagagactttattaaggataaatttgttagtcataagagatccagaatcctaagtcatcatgaccatggctcagagtgactaacaaataaacaaaattaataaaggtcagataaacaagtaaaaattaatgaataatccttagtcagataaggtgaactttgcagttggattcatcaataataatgaagaaatgcaggttgcaagaggtaggacagaatgaaataaaaattgagacaatcacattgaatcagggcataaatactttaacaaagcatataatgggaagttaagaccaagaaaacaactagaaacaagagagctttgaaagaaaaactaatcaggaaagctctaatggaaggtgttaacaagcarcacttttagattttaatcagtttactggtaatttcgagagcattaagtgattcttcttgggggctgtatgactctttcatctccgaacatttaaatcatgcttatttaaaaatctctttagtaaagttatggtggttcacagctgtaatctcaaccctttgggatgctgaaatgagaggattgtttgagcccaggagtttgaaatcagcatggacagcacaacgagagctcatcactacaaaaaataaaaaattagttgggcgtggtgacatgcacctgtggtcccagctactcagggggctgaggtgagagaaccacttgagcttagtaagttgaggctgaagtgagccgtgatcacaccactgcactccaacctggatgactgagcaaggccttaaaaaataaatataaaaatcgaaaatcaaaatctcactctggtcgtttcctctatctagaatccttgagtgcagatcttccaattgtgtatgactgcttaatgcctcatgtagttttcttgaggaaatcttcaatgggtgttgctttctgcaacatccctcatgttctgtattgtaagagcatcccttcacattttttcaattgtctctgctgcagtctagggagatctctagtttcacacactttttccttatttattttttaacaggatgccactgcacccggtagagtaaatattgttccctgcttctaagactatgtctcatcagttttcctcccaaaagtcactttgtaacagctcttacaagcatctagtcacagaattccctctgattttaacaatcggtaagcatctttccttcatttttgtttgtttgtttgtttgtttttactctaacgcccattctggagtgcaggggcacaatctcatctcactacaacctctgcctccctggttcaaagaattctcatgcctcagcctcccgagtagctgggattacaggcacccrccatgacatctggctaacttttgtatttttagtagagacagtgtttcatcatgttggccaggctggtctcgaacttctgatctcaggagttccgcccaccatggcctcccaaagtgctgggattacaggcgtgagccaccatgcctggctcttccatcattttatactaggctatacatgttgttctatgtcattttttcttgtagatgtgtatgtgtctgcagtagaataaatgggaaagaattgagccacttaggatcacctcagtattctatgccatatgattaatttgaggcctgttcataggaaacctattttatatttaaaatatctatgaataaatattttacaatgcataataaatgtttcagtagtcataaaatttaaattcacacaattttatgattttactgtgtttgtaatgtcaatatgtaatgaatttgctggttccttaatggcttctgttgactaattcaacagcttatattttggtgactttgagacatgactgcaaatactttgacattctaatcaaaccatggtccctttcccttgaactttagcaaggcctgtggctgtctcagcgaagaaagcatagtggaattgacagcataattttgaagactgcattagaaaaggcagtacattatctctgtctgtctcgttttctctgtctgtctgtctgtctttgtttttacttatgtatctttcttcctctctctctctgtccttctccttctgtctctttttctccctctgtacactttggagccctgtgttacagcaaaagtcctgatgataaatgacagtttgggaaggggagcacagaggagactaggaagtcaggattattcagtcaaaaaggagtttcagtcttttgacatcaatcactaagtatgtcaatgaatgaccttcagatgattacatccccagccaccacaggaaagtaacgacttgagaaatactgtgtatgaaccacctgctgagcctacccaacactcatgctatgagagttctaataaaatgcttattgtttttcaaagtccccacttttgagggtagttggttatgaagtgatagataactaaaatgatatttctaaaaatttaattatacattcataataatatacaattaatatagaggcaagaaaatgaaaactacaaatgtaacattttgaaaataactgtaactcagaaagggaggtcagcatagcatggtggttaagagctcttgcactctggatccagttagcctggattcaagtccctgcaaaaccactacagaattttgtggggtttggcaagttgcctccactctatgcctcaaattctccatcagtgaaacggagatggagtaatgccattatctacctcaggtggctgatgaaaggactgatacattaacctggtaaagcactacagttgctgtatgtaacaaactaaatttgcattaattataataattattaagtagacagaaaaatttccacaatgatttgagtccttacctaaattgcctcatatatttttaaatgtatcatgcttcaaatgtaaatgataaaaatgacagcatttgctattttaaatatgtcagaattaaatttatgataatttaattcaccaagggctgacaaatcagttgggtcctctgggcaaaatttggtcagccacatatttacatgtttttattcaatatttgaggtaaaattacataaaataacatgtactattttaaccatttaaaagtgaacaattcagtggcattcacagtattgtgtatcacttcaatctagatccaaaactgtcaccaacctaaaaggatgtttatacacattagacaggcaccctccattcgagcttgccctatcctggtaacatggcattttctgttaaaatcattctgttgtatattagaagatttttttaaagacataaaaaatatgtttttttcttaattcttttggtgttatgtatcacatttgttggtttgcatatgttcaatcttccctgcatccctgagataaatcccagttcatcatagtgtataatctttttgatgtgctgttgaatttgattggctattatttgttgagaatttttgcatctatgttcatcagaaaagttggacagatttttttctgtattttattttttatttttttactccctctttctggttttggtatcaatgtgatccttatcccagccataaaaccctattttttaaggcattcaattctccttcatgttttggaagaaacattttagaaaaatggtttaactattttttaataaagtacatttttatgtgagtttttattactgcttcaattttgttactcattatttctctgctcatgtttctatttcttcataatccaatcctgattggttgtacatatctaagaatttgtctgtatactttagattttttaattttttggcaggtacttgtttgtaatagcctcttataaacctttgtatttttgtgtatcagttgttatgtatccttttcatctcttatttcatttatttccgtcatctctttttgtagctattctagctgaagctttttcaatttctgtatttaaaaaaacaatttttctcttgttgatctttaaatattttccaaattttttttaactttatattttcggtgtttcctgagctcttttataaaaagatgtgctctgaattctctgtcagaaatgttatatatgtttatttctcctactgcattaggtgagttctgttgttttttagcggtgttgtgtttcctttcatctgtacattgctatttccatgtttaaagagatatccacatgttctagcttttataggtgtattcttgtgttgttcaacctttactatttattattggaatctaattccttgccaccagttgctttttgtttgggcaaggacttaatatttgccaccagaatttaatactgcaccaaaactcaatatttgctctaatgttgttttccagtcttgggagacttattgtgagcatctgaacttaaatgctgcactggaacttaaacccagacttgcagtgatttctagatctgggagaaaattaaacaatcatgggaacttgatttcaaaccttatacttgtttcccagtcatggaaaatctccacatgattacctgggaattgtaaaaagtcttatcaaagattcagaccttcctttagatcttgccccctgcagtgctatccttctggtcaaactcctcagtgtggtatccctgtagctaggtacacaaagcagatgccaagatctgtgtgccactcactgtgattactactctcacttttgtctccaatttacccccggtggttcagccctctgaacactcttcatacctcctgtggggtgggacaaatgtgggctttcccccaaaatttacagacccatgaagaaattaaatgtccacttgaaatttcctcctcccatttcaataactgcaggtgaaaggaagttatctcacagtggtgtcattttggtgtgtggaaggggagtggtacagtccaaaaaaattattcatcttaccaatcataagttttctcaggtccgtgagtcttgaggttttctccttctttcttgagatctggtgaattcagagtggcatttgtgtatttggatagctactagttatacttttgtgggagaattgatgttgggtttttacaattttattgttttgttgacatcacaaagtgtcaacaaattgacacttgatattgttgaaatagttttatgagtttgcaaaccattatgtttttagaatttgatgtctaccaaatattaaatgagttggacatttctcacttaaatgttctgtataattatcgggttgtgtgctgcttctagtaaataattattatatactgaagctatatgtttctaacacaaactttataatttctgttctaacatgcatctcagaatatagggacaatatagctatatgtatgacaacttcaaaattttattttaaaagtatacataaactatattattttatgtggtattgcatctttataatgaagacaattttttctctggagaaaatggaagaatttgcccagagctctgatgaagacggtgttgtgttttctctggagtcagctgtgcaaaaccttacagaagaaaaagctgatcttatcacttcggccctggctcagattccacaaaaagtcagtacaacctccaatccttataagaaactattcacacaatggagaaagtatggctttccacctggaacttgaatctcatttttcaatttgcataacaggcactagatttatgtaacaatttggaaagtattatggtartttatgtgagcacaactgattatttgtctagtgatctttgctattactttagtaacacatctcttggttgtcgtttgttaataataaagtaaaaataaagcattaagtccctatttcacgttgcaggatttgaaatcttaagacctattctgatgactccaaaggaaacttcttaagtatactagctcaaaggaacctaaactttgggggatgatataagaaagatagagaagaatcatgctcaatattatcttcaacatattttattgtataggagctctattcagtgtgtttgaacataaaagtagaagcttagatttatgtagtctttctaatgaactggagttttctatagttacaaggcaattatgattttaatattacagtctaacaacctgcatgtaatactttatgatattcaattaattttattactgtaawtctagttttcctctctttagttagtgctatttatacactagcctcaagggttactttttaaaattttatgtttaaatttcaaaacactcaataaaagccagtatgctaattaggaatgtgaaattagttttgattatgagattctctttttgggagttcagaatatctatgtaatcctttgttttcaagtgtaagattttcatataggtttccagaaagaaaaaagtatggaattaaggtacaaatacaaacaaaattcagccttgaacaatgaagtataggtaacttctgtctctttcttttttgattaaaaataaatgaaataaaggagagaatgaagcataaagagaaaagacaaccaactatccaaaaccagacaaaagccaaagcaatgtttgtctctgggaaactgtaaatttgataatagagctagaatggccaagtgatttacatttacacagcagttgtgtgtccacaaggatatttaacttccatatgctgacaaattagccaagactgcttatttgttgttatttatataatctcctagatgctttgagtttgcagtaaacaaaataataaatggtatacttaatagttgaatagtgtacacccttttgactgtgaacaatcctactatttctttcagtgattacaaaggacccttatatatccctgtctcaaatatcatctgaaatagaatggattgtatgaattataatgctctgaaaactcaaaatgctattatattgtggtttaacttgtgaaatgcatacattttcttcctcaggttttatggagattcaaaggaaagmaaccaactacattaggtgccaatactcagctctatgtttggatatgccagagtgatcttcakggtaagattatgacaaagtaaaataaggaatttcatgagggaaaaattgaattactgtttaacagctaataagtttaacaaaaatttaaaatgtatagtttgttactttaattttaattaaataaataattggtcattaattttttgattcttacttcctatttttaaagtaagtttcaagcaatgcagaatttttttttcaaatgaatacatatggctcattttattcaatamtcatacttacagaatatatgcaaatccgcctttccaatgataaatagtagtatttaagactgataaacttttgaaagggcagttaaaggttatagtctactgttttctaacttcagaaatacttttgtttgaaaggtgggagataaagtttcaaggagattargtcccaatattcctattttaaatctctcagcttgtgcaggcagggcaggtaaacatgaagtttttaaggatagaagggtcctgaaagatagtagagtatgtctgctrcataataggtactcaggttaggtttgatgaataagtggaatgaaagaatggataaatacagttggggagttcaatatttttaaatgaactcctataaggcaatatttttgcaatagtaattatttatatgtgttatgtttatttttaaagaatacaattaaaatgaaatgattaatctatcattgtttgcataaaaaattgaatgaatatataaraaaaacatgtacataataaaatatatagaaaataaaatctggaaacataaaaacattccctttttacttctgaagagactaaaagttcaaagaagataacaatacacacaataatgataaaaaataggaagcaagaaattatttttatcagtgcaagattcatattcctctcctcccaaggattattccattaataataaacttttactaaaagttttgtacatgctcactgcagcaatcacagataagaaaaaggaaaaaaactacttaaaattcaaatgctcagaaattacaaatttaatattttrtacatattttttgctaaaacaagaccatagtatgtttgtgtgtatgtataatttaactgatttttttcctcactagctataacaaaatacatcttttcacatccacgtacttctgtatctattgccaccttcaatggtcacatattattccatccaatggatgcaactgaaatttatgtataggattcattctatgggttctttttaaaataagtgttgtgaaaaataaagtgcatgtatctttctctaatgaccaacatcactggtcattagagaaatgcagatcaaaaccacaatgagataccatctcatgacagttagaatggtgatcattaaaaagtcaggatacaacagatgctggagaggatgtggagaaataggaatgcttttacactgttggtgggagtgtaaattagttctaccattgtggaagacagtgtggtgattcctcaaggatctagaacaagaaataccatttgacccagcaatctcattactgggtatatacccaaaagattataaatcattctactatgaagacacatgcacacatatgtttattgtggcattgtttacaacagcatagacttggaaccaacccaaatttccatcaatgataggttgcataaagtggcacatatataccatggaatactatgcagccataaaaaaaggctgagctcacgtcatttgcaggcacatggatgaagctggaaaccaccattctcagcaagctaacacaagaacagaaaataaaacaccgcatgttctcactcataagtgggagttgaacattgagtacacatggacacagggaggggaacgtcacacactggggcctgtcagggggtggggaggtaggggagaaatagcattaggagaaatatctaatgtagatgacgggttgatgggtgcaggaaaccaccatggcacatgtatacctatgtaaccaacctgcacgttctgcacatgtatcccagaacttaaagtataatttaaaaaaaaaaaattgtctctacaaaaaactttttaaaaaattggcctggtgtggtagtgctcctgtagtcctagctactcagcaggctgaggtgagaggatcccttgagcctaggagatggaggttactgtaagcctcaatgtcaccactgcatttcagcctgggcaacagagaaagaccttgtttcaaaacaaaacaaaaggattgccaaacccaaacataaagcttttagaggaaaacaggagccatctcccttgattacttggcagcaggcaaagctttcttaggttacagaaaaaccataaaagaaaaaataataaaataataaattagacttcataaacaaacaaatgacaaccgcaaaatctcccactcacaagacactgtagaaacaatccaagtatccatcgattggagaatgaataaacaaacggaggtgcagaatatgcagtgtactcatatacatctgtgacatgcaataatacagatgaatccaaaacatgttaggctgagtggaaactagccacaaaagagtacctactgcatgcataatttcatatataagatgttctaaaacaatctcttctgggaagcaagggctgagttgggctgggaagaggcatgaaaggacatttttgtggtgataataatgtcttagggggtttgggtttacagaggtgtaagcatttgttgaaactcaaaaaatgtgtagtgaagatatatgtatttcattgtatgtaaattttataataaaatactgaaaaatatactctactcaattatatatatatactgactataagtaaaaaaagcacatctcttcctagattttattgttaaattgaatgaataagaactgtatatctttcttatctggttattgtgagtagccatgcaatgattcttagaatatttggtaaaattattctcatcataaagagattctcagtaaatgtttgctactattactgttttttcttgtattttggttttagaatttaagaagtgtcaacattttactttgaggcattgtattgaatgctttgaggcatttagtgttgaagtaattatggactaatagaaaaataataaggatggatataagtatatgcttaccaagttaaaactatgaagtgctaatgcatagcactgtagcaatagcaatggaggtaacttctgctcttgttgtttaaaaatcacagtaggaagattgtgcttttcagatggtgacattaatcttgatttatgtttttaatacaattgcaaaaaactataatcaagaagttacatagtacaaagaaacaatacgatgcaagtcatttcatatacattcaatatgtgttaactattcaaaaattatctttctttttcaacaccagaatgagttcattaaaattaatattaaaaacataatagtaaatattaaaattatttaatttttattaatataactattgataaaatagcataactaaaattattgtgtgtactaagataatttaaaaacaacaaatttctggtttcagacactttggctgttaaccagaaatattccaatttatccctttcaagttcattattttataattatttcaaataagacaaaagcaaccacaactacaatagcaaagagtatggtcacatttatactagtatcttattttttcaattgttttaaacaggtaaatttgaaaggcgtagtggtctacacttcatcagtgatgggattaaaaatattagcgtcaaaattatatccttataattaaatagaagaggaactagcgattgtttatgtcatgccaatttactgaaaataaagcattttgggagagttttaaaatcaataaaatattgagtaactaatgtgagatgattgacatgcttacctgcttcattatagtaactttttcactatctatttgtatctgataatatcacctcgtaactttaagtataccaaataaaatttatccagaaaactaacatttgatgaactctcatgctgaaacactggcataaacatgctgaaaattagttaatactctaataatatttatgcttccctgcttcaactttgttctcagtcttccttataatttgttgttccatcttcagcaattcctcttatttcatttttgactattttaaaacttatgcactagcctagaacctctgataaatatttccactaaaaccaccaaagagaagtataggcgacactccagtatgaaatgtgttaccacttcatgataaagactggggattttttcccaaagaaaatgcagtcgctggaaataatagatgtgctgttatttttcagttgcaattgaaatatccctacatagggagaaagggtgtttgtaatgattgaattaggagacagacaacctagaaaattattgaacttttattgtttaagaggtaactacagttgaaatagaaataaagataatttgtttctggccataaagaatgtaactgtgtataaaaaaatggtaactgttgtagtttattgtaattttccccaggactggaacataaatataaacatgttagattttatttttgagtttttaaataataaatggtgagtctgtttgttttctgttgaagtattttcatcaggattggctgttagccatgttttcaatatttgttttcaaagtctcaccaaggccattctggactacccactacacagcgaagtattggtacaaaggtatctgatttcctgtcatcaaatttccatgtaataatttatataaagaaaatactttattctgagtcaaattcaaattaaagcatatttgttagaattctaaagactgagatccctgctaaatgtcttctacatagcacacaaagagatgaggataagacaggttaattaatgagaactactggaagtctgaagtaaatagaacaactatatttcctggacttatttttacattaagtcagtttaaatgcaatcataatatttcatacatagtgacttaaacaattgagataataaatgaaaaattcaagtatttaattgttagtcataattctagtgtgaagaagagtaacaaattcataatggtccacacttttaaaattaatgtgtgtactatacttactgtcatcttccaaatttattattaagctttttgatttttaaaataatgaaatgggagacagtttacttatcttcacttgttccatagttagagtctgacatcctttgatttacaaagaaagcaaatctatgcaatcctctctgtatgagaaataaattaattctgcttaggaattacatataaagagaaaaaaattcaagtggcatttttcacatatatccataatattattacatctgttagcatagacatttttagatttgggtaagaatgattggcatcttataaataataatactgctgaaaaaatttctaaaatgcaatgatgctaaattttattcaaagactgttaagtctttgatgacatagtccaaagcattgaaagcagtgtttaatgtggttgtctatagctaagccatttggtatattcctagtaacaaaatgaggtactgattttggaattaccaggaaatcttcataaactagtgtataatttacaagttttaaaattcattttttatgcragtgttaaaaataacttcaggtttgcagacaaaaaatagtataggtaattacaaaaagctatatagaatataaaaataaagagtatttcataagtattcaaagatcatagttttgttgtacatattagaaagttagttattactatattttaggggttggagcatctgagcttctctccttgcttgatttttcctctctttcttcttcttcttcttcctttttttttttatttggaacagtctcactctgcctttctggttggagtgcaggagtgtgatcatagctcagtgtaaccttaaactcctggactccatcaatcctcctgcctcagcctcgagaatagctaagactacaggcatgcacctctgcacacttctatttattattattattactttttgtagagacagggtctctgtatgttgcccaggctggtctcaaattcctgggctcaagaatgcttcgacttcagcctctcaaagtcttgggactacaggcgtgagccagcatacctggccttgactctttcttatatcctcttcttcttcaagtgggtgatagcgtaaatacatgggttagaagtggagtcttttgggggaacattttatactgatggtccaccttaagggcaggatccaatccccttcctttctgttacaccttcctttcagacgttggcaatgtctagtctatcaagccaggttggtttttctatttctctaaatctacctggctgagtgggtgcctagactcaaggtggggagccgtgggctttctttctctgaatagtcccctgaacaacacactgaataggtctatttcaaaattagggaaagtaaagaggctcagattacatgggaagtctaaattcccataatacattttggatttttttcaatacctacttattgttattgtgctagtgtagttagccatcaatataactcctttctgataatatttgtagtgtatagagtgctctcaggattcctgtaagcaaagcgatcaaatgacagggcagaatttggtgatatctgttacctgcctcaaataccataataccagaatgccacactgcgcttcttcattatatatcctttctgatcataatggtcatgccaaagtactgttcatcaaaaaaactcttaccattttattatctgtcatatacattgtttttaaactgacatctgaggtgaattcaaattatctgaaaagctaacttgtcaggcaggaaatttttatcctttaaccctttacagagtttaaagctcttttcagtagttttccatcactcaggcaatttatctaacctttggagagaagtgcacaaaggctgttgcaatcacattgaccctttcctctgtgatgttactgaccattgaccccagagacaacgatgcaatgctattttctccagatctctgggaaagttttcatttcctatgaagaaataatttgctctgtcacaaaagagcaataacacagccaacattattggaagaattgctacaagaaactaagtagaaaaaatcaagta

SEQ ID NO: 94024 - DNA, 23754 bp, Homo sapiens
ctgggattacaggcatgagccactgtgtctggtttatttttctttaacaaaggtcacagatagttttttttaactaaatatatacatattatatatatatatatacacacacacatatgtatatataaataacaagttgtatttattatatattgataatatattatataaatgtatattcatatgtataatatatattaaccactattctgcaccatggcctaactggatgcaacttcctcaactaaatgtgaggtttatatgtatacacatatatatatgtgtgtatatattttatatatatatattatgtataatgtttaaagaaaaatctatctgcaacctttgttaaagaacagtaatgcagactttatttaaggggactatagagacaggtatgggaattaccaaagtggggttttacagtaggggtgagaaactgggctcaactctgaatacaacaaggaaaagtgggaatttatagccaaggaacagagtcggaattccaacccaggctctgcagcacatgcccttaacctccgtgctgcaccacggcctaactggatgcaacttcctcaactaagtgtgaggtttataatgcctgcctttctctattcacaggatttcctgtccttagttatttgcttttattctgtctcattccaaattggatttgcagaggctctgagaaaccaacaagataattcccataaaagtattttgaagactattaagggaacgaaaggaaatctgcatttactgtgcacctgtatgtgtcaaacacagtgccaggcaccttcacagtggtcaaatttagcacacacaataaataagaatcctccatcaactgagattcttggagggcaggactatactttgctctccaagtatcctggatgcttttcattgggcctggaggagtgtaggtgcccattaaatgcctatgaatgaatggggttactgcccagtgatgtaacatgaagccagacagttgttgctaggagcttcttgggtggggcaaaggatttcatgtgggatccaatatcttccaggagatgaaagaatgatcccagctcatgttgctgtggagagggaaggaggagttttctccagagagcggctcactggggaaaacatttgcaggtgctcttgttaaaattatccagttcttttgtgcaacacaatccccaggctggaaaacactgcctcatatgtcatatggactttataaaacttgctctttctgtaggaaagtctctccacttaatagacactgaattcctttaatccccagccctgggaagtgtccccctggagagaggtaacatgcataggtttctgccctgtggcttgttccatatcaatccttcctcagataaactcaaagcaacaaaaatagcccctggcctaacatgcaaggggctttgtgttaggtgcatgtgtatcaaggagtggtttgcatgcaggcagtgtgcaggtggctattttagtgttagtgaaagatagcctggcaaacattcaggtctgtgtcacctgaggctctgggaggactgggactttctgaagttcccaggagttctctaaactttggtctgttgatctaagagaaatattcttcctgggtggcaaagaggcattggcttctatttctgtatcaggaagaaagagcatgaggctttggagttaaccccactaggtttgggtcttggctgtgtcattttctatccatttgagacaaggcaagttacctccctctccaggtctcagattccatacacatacacactcattctctctctctctctccttctctcaatgataatatatacatcaaagggctgttttgagcattaccatgagacaagatatgtataggaccagcttgtagtaggtactcggtacatattgggtctcattccttccagagccaccagtagggattgtcccagtgcaggcagtggggagacactcctcccctgctgctgtttgaatccagatgaaatctagtttaaatggacaccagggcattctgagaggggagagtgtggttgaaggtacagaagttggggagggttgcctgtggaatgggttctgggaattgtagtagatgctgtcaatgtccctgcaatattcccttggcccatcctgttggtcatgtgtaacttgatggaaagtttccatatcatgccaatgacttcctacctcaagcacatgattctctctgtttaaaggttttatctggcctcatatgcatgttctgcctgaaagtgctgggaaattaatgtctccaggaacaactcttaaccaatggagacaggagttgatggataaaaatcccagctttttgctccattgtgggggacaattctgagctgtgctctgcagagtttctcagagggtctccagtgggattgagccacagtggaccatagcagcatgcagttatttacacacccagttgcagagtttaacatacttctctgccccctcacttgcttcctgggaaaagtacttgtactttgacctcgaaaagtacttgtacacaaatctttctcaggatctgcttttgcgggaaccccaaccaagaaagaaacctgtagcccagtagcctttaggaatgtaggccctgcttatccaacctgggccagcttcatgagaaagacagcttctttctttctcacaaacttctgcttcacttcacagctgctatcggttttgtgggaggggagggcctcatggattatggaaaataacacactctccttaattctctccttttccttgttccagaaacaagccaaaagcatcccttaccttgaaagaaagaaacacaagaagaggccttgtgctttaccagtcttgactgcaattgtcagggtccacttattatttatgataatactttgtggggttctttttataaaatatttttgcaactgaaggatctctcctcttggagtgaggactctctgcaatgtcttttttctttttctttttttttttagacggagtcttgttctgttgcgcagactggagtgcagtagtgcaatctcagctcactgcaacctccgcctcccgggttcaagtgattcttgtgcctcagcctcctgagtagttgggattacaggcctccaccaccacgcccagctaatttttgtatttttgatagagacggggctttgccatgttgtccagtctggtctcgaactcctgacctcaagtgatccactcgccttggcctcccaaagtgatgggattacaggtgtgagccactgygcccggcctgactctcttcaatttcttttttttcttttcttttcttttttctttttttttttgagacagagtcttgtgctgctgcccaggctggtgtgcagtggcacaatcttggctcactgcaacctctgcctcctgggttcaagcgattctcctgcctcagcctcccgagtagctgggactacaggcatgcaccaccatacccggctaattttttatttccagtagaaatggggtttcaccatgttggccaggctggtctcgagctcctgacctcaagtgatccacccaccctggcctcccaaagtgatgggattacaggtgtgagccactgtgcctggcctgattgtctgcaatttctttctttctttttcttttttttcttttcttgggatggagtctcgctctgttgcccaggctggagtgcagtgatgcaatcttggctcactgcaacctccgcctcccaggttcaagggattctcctgcctcagcctcccgagtagctgagactacaggcatgtgccaccacacccagctaatttttgtatttttagcagagacagggtttcaccatgttggccaggctgatctcgaactcctggcctcaagtgatccacccacctcagcctcccaaagtgttgggattacaggcatgagccactgcacccaggctgccatttcttatgcaactgagtgtaactattatagtggattgtcctttagggtcctttttctaggaactgctttttcctttgtccatggaatgagaacagaagttggcatgttagcacagagtgactctcaatccctggatccagttaatttgttcagggattggcatctacatcaagctcagccaataaggctctttccaaagatttttggacttggaaccagagagaccttgaattcagtctctcaagctgtgagacataaatctcaggagctgtcagcagccaagtttcttgctatgtcacaaaaatcagtctgagtgggaaagagtattgttgatatgcaaagaggagcaaacatgagtgacaagggagagccctgagcactcacggttctatttctactatggcccagctgcatctttggatattccgttgagttggctaagaagagttgaccctttcttagatgctaagaaccaatcagttccatgttttctttaagctgatttgaattgtgtttctgtcactagcaacccaaaagtcctcagtgatacaaagataaattttaaactcttagggatatattgtggaggctccagcactggttcttcctaagacattgttgggaaaccatggtggactttatggtatctctttaacatccagcatactcttccaccattggagaatagctatgctgtgtgggcagttttctgtagctccagggaagggcctggattgttgaaggcaatgataattatcctawcycctttgcagtgattgtcagaaatggccatgtgactcaatttgaggaagtctgccaaggaattctgggaaaagtttattcactcttaagagagacccacaggaggatatgttcttttcttattcagggctatgttgtatatgttgagaggctggaaactactgtagctatctctttaccagtctgaggataaaacaaagacatggagaaggtcaaagaaatggagttagaaccattctgtctggtcttccagtttagtgggtcaatgcattttcttataatttagctaatttggattgggtgtttttgttctgtttcgttttgctgctgaaagcatgctgaccaacacaaaactctcagccaatggatcacaggaataatctctgttcatatcaagtctttcatatccagaatctgtttcctctgttccatttgtcctatgtcattctcattctactgggattaaccccagtcgatgtttgcctggggtggttgtggggggaggggcgggtgttaggccatttttgtgttcctataaagaaatgcaggagactgggtaatttttaaagaaaagaggttttattttggttcatggttctgcaggctgtacatgaagcatagtgccagcatctgcttctggtgagggcctcaggaagcttacagtcacggtagaaggcaaaaagggagccagcacatcacatggtgagagaagagagcaaggtgggaggtgccacactcttttaaacagccacatcttgtgtgaaccaccagagcaagaactcactcaccacaaaggggttggcactaagccattaataagggatccatctccatgatccaaacacttccaacatgagatttagaggggacaaacatctaagctatatcaccttgtttcagggtctctgacattacttttgcaatttgtaaaaagtccatgtttactccagcttccatcagttgatttctgcggaggctggtttcttccaatatgtgttgcaaaatgttgaggtcattctgtttttgcttttctgggagtgcttttatctgtttgcctaagaaggagtccctcaaatgtgctgctttgtctgatgcctgtttcccaccttaataaactttctctgccttgttgctgtagtctctgtggcaagaagagaccctttctgataggagtcttggtagggaacagaacttgccygcccccaacccagtcccattgcacaacaccgtgatgcttcctgtgtaacatggtctaccccctctctagcagcactagcacgagggcatgccctgtgaacctgaggctcttagtgcctgggccacacaagcacacaggtcaggcttttcctgccaatcataagggaagkagtgaccaamataacatgtggggaagttacaatggtttgggaaacctcaaaaaattctaatggcagtgattttacagtctatgctaaatattaatgaattactttcttttaatgttgtagtccttttctttgctcacatggaaagagaaagaggtgaaacagcatgtagcatccaaaaataagaagatcttttccagagctgtgctccctgcccgcagccaggccccaacccacctctgcaacccctcctcctctcttccaatggcagtggcagtggcagctctttccttgctcctgacatcaccaccttgagcatcccctggctccaccaagctccagctatgtccaatatggtgctgcttggcagcagctcactgggacttgcccagaaagtggtgaaaaggtgggggttggagttgggcaaggtggtcactaagaagttcagcaatcaggaggttagcatagtgagtggtgaaagaatgagagaccaagctgcctatgtcattgtgaaaattaatgacaccttgacatctcttgctatgaccaatgtgtgcaaagccacatggtcctctggcatgaaggcagtactctcatgttctccatatgcccaacaagatcaaaaggacaagagtcatcctgcagtttctgcaaaacttgtagccaatgtgttttyagtagctgggttggagcatgtcagtactrtggatctgcacactgctcaaatacagggattcttcagtactgctgtgaatgacktacatgtggagcctgcagttctgtgrtggacctgagagaatattgcagactggaggaactgcagcattgtttcacccaaagcaggaggagccaaagagactccaccattcatggacagacctaacatggcttgccttgcaggagaagtgttggggtggataggatgtttctggttggtgatattaaagactgggtggctgtccttgtggatgacatmcccaatgcatgtggcacaacacatgactctgcagacaagctactgtctgctggaaccactaaagtttataccacttcagctctgaggctgttattttacaaacaccagtccccaacaagacaacatgattttgctcttacttgtttagccatgttcctctatagctccatgtattggtctgttttcatgctgctaataaagacatacccgacactgggtaatttacaaaagatagrgatttattgaacttatagttccatgtggctggggaggcctaacaatcatggcrgaacrtgaaagccaygtctcacatggtggcagacaagagaagagagcttgtgcagggaaactctccytttaaaatgatcagatctcgtgagactcattcactatccygagaacagtrcaggagagacttgcccccataattcaatcacctcccactgggttcctcccatgacatgtgggaattgtggaagttacaattcaagatgagatttgggtggggacacagccaaaccatatcactccagaatatcacgatttcaaacaycatatttggaatttaaacaaaaatgttgactttagatctcaataaaatatagaatgacaaatgttaaaacatcagatctctgttttaaaccttggaactctatggtttcaggagacaacaggtagggataaagtaatatttgtttagtttttaattgaacttgtcttgaatgagaaatatatrtgtgactttaacttgtgataggtaactttaacctttgttcttatggtactttgaggtcacaatcatattacagaattgtatagaatttccttctgtaatagaaaccccttgtaaaaattcatagcctacatacatatgttgccaaagataccaccctattacagcaccttgagtaggagtttatatgtaatagtaatattatgaacactggggttaagtcctatatggacttagaacatttcttttgagtgaatgtttaaaaatcatataatataagaatactgacttttttgaacaaagctttatttagctaaaaatgaccactgatccatttcttttcttttcttttcttttgagacagggtctggctctgtcacccaggctggagtgcagtggtgcgatctcggctcactgcgacctctgtctcctaggttcaagcaattctcctgcctcagcctcccaagtagcagggattacaggcatgtgcaatgatgcctggctaatttttgtatttttagtagagatggggtttcgccatgttcgccaggctggtcttgaattactgacctcaagtgatccgcctggcttggcctcccaaagtgctgtgattacaagtgtaagccatggtgcccagccatcctatctatatttttcaaataaaatctgtagttaaaaaaatcatttgcttgagagacttgttacttcagaatactaaaggcaaaaatatatttaatatgaatgaataaacaaacacatgcagaaagaaacaaagaaagggatagtgttttgttttttgttttttgttttgtttgtttgtttgtttttgagtcaggatctagctctgtcacccaggttgaagtgaaggggcacacatgattttggctcactgcaacctccgcctcctgggttcaagccatcctcctgcctcagcctcctgaatagctgggactataggcacatgccaccacgcctggctaatttttgtatttttttgtagagatgaggtttcactatgttgaccaggctggtcccgacctcctgacctcaagtgatctacctgcctcggcctttcagagtgctgggatgacaggcgtgaaccaccgtgtttgaccttgaatttcttagaaaaatggaaatacagtttttgacctgcttagataccttgacatataaatacagactaaacacagaattaaacgtagttcatttagaaataaatattctgctttgagatatttagaatctaagaatatactgaaccagttttaaaataatgatcctcatacagaacacatgacttaaaaatctgcattgtctttccttgtcctgatatgtattattttatcattacttaacaggacttttgtattttaaagtattttatacacaatgtgtataggctggatttggccatactcaggggccaaattttaaagagatttgggggttgcaatccagcccagttaataaagatcctctgtaagcagctgatcccagtgtttgcccatcttttgctactcattgttctggaagctgtgataccaaccacattttctgatcatgtctaaktctgctgaatgcagagaggctcaggctctatctagtaaaataagggagtcagagaaatatgaacatgtgaaagtcattgagcccagactaaaattacaacaatcaacttacaagtatttatattataccatattatatgtcaacaatattcaggaatagtatatttggtgtgtgtatagaatacagtgttcctccaaaactgtgctaaaatattttaaataaaatcatacagcaaactaaaaacagtaaaaagaagatccctttcttcttaagaatatcttattccttctcactggggatttcttggaagttgttctagtcaagtgttttccttgagctgaaagagggaagaggcataycaaaaacattgggatcaatgtagaaacttgtacatgaatgtttatagcagcattattcagcatagccaagagatggaaacaatccatatgtctgtcaacagatgaaatcaacaacttgtcgtacatccatacaatggaatattattcagccataaaaaggaatgagtaaagtactgatttctcctataasacagatgaaccttgaaatcattatactgtgaaagaagccagacacaaaaggtcatatactgtgaatcctgttatagggaatatccagaacagacaaagttgtagagatagaacacaggttagaggttaccaggggatgggactaaggaagaaggtggagtgactacttaatgggcacaggatgtttttatggggtgataaaaagttttggaattcgcgaaagccattggttgtatagcattgtaagtatgctaaataccactgaattgtaaattttwaaatggttgtgtgytatgtgaatttcatcttaagttttttaaaagttgaaaaggctttaaaaaaatgtgagcccttatcacccccaccctgcacattctgatttgcctcctagggagcatactgacatgtaagttcactttataagggatgtgaggtgactacctggcttagagtgactcatcatcacttaytatgtactttggaagcttgagagcagtgcattttgggcaatttgctgattgctttakgcaatcctaacgttgagccccgtgggtagcaagaaatagcaggtgattagaacagaagcaattactctcagaaaagcatcattaatttcaaaagctctcgtcctgagatatgtggctaagtggggacaaattaggatgctgtctagaggaaagaaagtgaagtagtttccccctctttaggacagaaaggwaacctaatgtcatctgttccaagtagttaaccctcctctgggggtgggaatggcggacttgggattggcccgttgtaggaaggtcggccgtgggaggcctagggtctgtaccaattccagtttaagctgctgaattcagttttttcttgctttacctcctccacaatgaaaagtgctgtttcatgtttcccgtttgtctgcatcacagtgcctttctggggtttaattaatattatagaaaaggcaagaaacattctaaggagactgggcttctagggtctcttttggaatccactgtgtccagccacaagtctcgtcctttttctgcattctgctcttcagtaaagcaaatcaaagcaaaggaaggtcaccttcttcttaacaaggtgctcaaagcttttgggcagtgtgctcttttaccctccacttctggaactccacccaggcaggacataagacaaaaacatagaaaacaaaatccaaacctcaatcactaatgaatgcagtgagagtttgtcaagattatctacatgattacycaggtagcagttgctatctctctgaggcttaaaattacacatattgggcacatagtatgtgctaagctttggactatgttctttcacaaagattatgtcattgaacgatattttgaggcattactgtctcctctttacagaagaggaaactaaggtccaaatagactgcatgacaagccttacatctcatagccaggatttaaatgcaaattttaactccaaatctagtgctttttctatatcataatatgtatataggtgacttttctttggggcatgactcagtggttgtacctatgctttctcttctgatccttctctttctagctccaataatagaatccccactccttccaaagaaatagctctacattttatttgatagcctggagtaatatgacttctgcctccatcttcccattgaaacactctgcagaattgggtttccaaaataaatgtgcatagtttatgttcttactggacctctccatggtggttgctctgtggacaaccacttgctcctcctatgttgccttgtcctgctctcttctggtcctcctctctctctgagttttcctcctcagtctcctttgagggttcctctttcactcagaatgatcaatagcaaaaatgtccatgaactatgaagagaagcccccatcaccactcacagttacacagtggttgcacatcagtgcatttcccaaagtctggatgattcaaagtaaatagcaccgcccaaagaacgagtcctggtctaagctgggacctagtcttcttcttcacttttgaatcctcactgcttggtccatcattggtatagaaggaagtatttgctgagtaaattgaaagaataatgagtaggaggtcttctaataaagagtccacttcggccgggcgcggtggctcacgcctgtaatcccagcactttgggaggccgaggcaggcgcatcacaaggtcaggagatcgagaccatcctggctaacacggtgaaaccctgtctctactaaaaatacaaaaaattagccaggcgtggtggcgggcacctgtactcccagctacttgggaggctgaggcaggaaaacagcgtgaacccgggaggcggagcttgcagtgagcccatatcatgccactgcactccagcctgggcaacagtgcgagactccctctcaaaaaaaaaaaaaaaaaaaagagttcacttcatgaagagggtgcaagaagtggccagaaatgtttgaggccttcctaggcaactgtgaagagtgcagtgggactaccatatagggtagaaggccggaggaactgttgaaggtgaggttgggaagtgtgaaagactcggaaagtgccaaaaagaaaaaaaaaaagagagagagagagaaaaaaagattaccgagatgaccgggtgccttatggaatgctgagcattgtctagtgcacttttccataatatcttgttctacagtggtctgcaactttcaatgtttgaactcttttaccactttgtaagttgtagaaaactgatagtaatgcaaattaatcttttttatggaaatgaaatgaattttgtcaggtaggtgacattgattccctgcctgcttcacccccaaaccctaccatggaagcattcaggtttgcatctattaacaaattcattttagtattcttcattgcctatatatgtgtctgtctgtggacacacctttgaactgggctttaacatgttactagttcctcattttaatgagcaacatataatctttgacccatgttcattttatgtttgcatgagagccatgattttacctttttgtagagaattatcctttaaaagaaagtagatgacaattaggctctgaagggccttaaaagccactttagagggtttagcttttatacagtgtcagaggattttaaagctgaaacaaaatggaattagatttgtgtttttggacaaacacttttggagtacgtgtggttggggtagagagaccagctattgggccattgctggagtccactttggagaaaatgaaagaaggaataggacacaatttgaaccttagaatgtagagtgatgcctggtgcttcgaaaacgcttactgaaggaataaagaagtgaatgaacttactaactttaggaaaggcaaataagagaggcatttctgagggcaaatttaaattaggtatacccactaccttccagactcaataatttaaaccttatgatcagattcttcgggtttatattttcacttgtccttattaatactttttttttttctagtagcatcaagtaacagatcttcttcttcyttttttttttttttttttttttttttgagacagagtctcactctgtagcccaggctggagtgccgtggcgccatcttggcttactggaagctcgcctcccgggttcacgccattctcctgcctcagcctcctgagtagctgggactacaggcacccgccaccatgcctggctaattttttgtatttttagtagagacggggtttcaccatgttagccaggatagtctcgatctcctgacctcgtgatccacccacctcggcctcccaaagtgctaggtttacaggcgtgagccactgcgcccggccgtaacagatcttcttaactacacatactctaaaatcctctttaactcaatkttttacttactttcacaattttatacttgtttctattgattcagagagtctttaggtcacaggatctcacagctgtcctccctgcagagaattatgctccctagagaggtaagtgaaaaaaatgcgcactttgaggttttagacagcgacaatgggcccaatgrgccactcactgtgtagtctcctcctcttacatcatcagcatgtggctttytgtgtcaatgggacattagcaggcatgatacaagcaggggctgggtcatgtacactggggcttgtcccctagagcaatctcttttggaacccagctaccatgctgtactgaagtctaggccatcctgttgcagagtaaraccacatgggggaagatctggagttggagacactcatggaagaccatgtgaaggagatggggatcccttgctaagctccctgctgaatataagctgtgggaatgacctcagccaacaccacatggagcagaacttcccagtcaacccatagacttaggagaagtgataaatcattgtagttttaaaccactacgtttctgtgtgtgtgtgtgtgtgtgtgtttcatgtaacaataggaaactaaaacacaggatgagagtagcttgcctagagggtgaccaggaagagtacatctgagggaaatttactgtttgaaaaaaatctcaatcaatgcttcctgtggttttgttcagccatagttcctatcagcagtaaggtagtgtcttagtctatttttattgctataagactgggtaatttataaataaagaggtttattcagctcatggttctgcaggttgtacaagggaactggcaacagcatatgcttctggtgagggcttcaggaagtttccaatcatgggggaagggggatgggagggggcatcacatacacagaggggaggcaccatgttccccttcttccccttcccgttccccttctcccccttcccgttccccttctccttcttcctcttcttcctcttcctcttcctcttcctcttcctcttcttcttcttcttcttcttcttcttcttcttcttcttcttcttcttgcttctgcttctgcttctgcttcttgttcttgacagtctagctcttttgctcaggctcgagtgcagtagcgtgatctcagttcactgcaacctccacttccctggttcaagtgtttcttgtgtctcagcctcctgagtagctgggtttacaggtgtgcaccaccacccccagctaattttttttatatttttagtcaagatgagtttttgctatgttggccaggatggtctcaaactcctggcctcaagtgatctgtctaccttggcttcccaaagttctgggattgcaggcgtgagtcaccacaccttgctcaccatgctcttctaaacaaccagctattacgtaaactaatagagcgagaactcactcattaccatggggatggcaccaagccattcatgagagatcaacctccatgacccaaacacctcccagttggccccatctccaaaactgggaccaaatttcaatataagatttgaagaggacaaatatccaaaccatcttaggtagcaagtgcaccgtctttcagcaggctaagctcagctctcagcaggctaaggctaatgggtctttgagtgcttcatttactttattctctgcctgttctgcctgggtcttactgaagggaaagataccatggcaaactctcaggcacagcagattctagaggacatcaataattggctgtctatgtcagacaggtgcctgaaaagttggcgtcaccatagcaagcttttgaggggtgtggggattggatccatttggctaattaataatgatatttaatacacacatatgcctgcatagaaaagtttgaacatgaaattagagctaattaaaatagaacatgacaacctgaagtgactttgtcttgttcttgctttgggtatattttttatatcacaggaaaaggacttttaattgtaaaagttagctacccttgggtgacctaaaaaatgaatacctgtctaaagatacaacaatcaatgctccctttcttttttttcttttctttttctttttctttttttgagatggagtcttgttctgtcacccaggctacagtgtgcattgacacaatctcggctcactgcaacttccgcctcccaggttcaggcgattctctcacctcagcctcctgagtagctggaattacaggtgcctgccaccatgcctggctaatttgtatttttagtagagatcggttttcaccatgttggccaggctggtcttgaactcctgacctcaggtgatctgcccgccttggtctcccaaactgctgggattacaggcatgaaccaccatgcccagcctcccttttcaatatttcttactgaattaccactttaatcttcaccttttattcctttgctctccttcttatcctaattaccaatatatataatattgaatgaaaattttagttgctttgcttgatgaagaatatttggttacagatctatgaactgctgttgggtttttgtttggttgagtggataaagtaagctgaaagtgatggcagataactcggggcaatttttgctgaggatatgtgaaggaagggcagaggagtggtggtgagctatcagagagatagctctggaagggttgttcaaggcagaattattggagtgaagggctcagcagaggctcttcactctgtttctgtttctgtgagatctgtaaaatatccatgactagtaaatttattgtggaatttgtctgtcttgagatatattaaagaaatcctgagtccttgggtgtgggatatagcagagactgcctctggagatccacatcattgggattccatgggggaatgtttgtggcaggaatttcagcataatgagcagaaactggccctcccacagagtctttcccctctcattaagaagagtgctcctcctttsttctgtgagcaggccaaatggatttgattatcaagggccaagttcatgggaagggggraagggtaacgaataggttggggcactgttgctttgcctaaccttgttaaaagaagcccgattttgtttgggaggcaactcccagccccaggtaagaaatcaggattaaggtaattacagtatcctatttctctttgccagtgatttgtttagggaactgggcatatgacctggttctggcccgtgagatacaaggggggatgtttgctgagtgacttccaattttcttccgtaataagagaggtttgtattaccagaaggtcctttcccaccagtcctcttctttcctacttggattactatggtgtgaggaagtcatggctggagctttggcagccattttgtgaccctgagatgaaggccaatacaattgcagggaggttacacaaccttggagctacctatctctagacattttgtcaggtgagatgaataaatacatttgtggttaagccactgttagtcaggttttctgttatgtgcagctgatatagaacccaagtgctccctctcctttggtcataggctagatgaagttagacgctttagtcctcacctcgtgggtagagttggagtttccaagttgcagcccgaggcagctgcagaattgaggtagtgttctggggtcatgaagggtttgcttttgttgctaggcagcacrctggggtctggtccttacagagctctctctcagtgttctttacctgtctccatgctscctccctccatcttccaggaactgtctctacctgtggggatggacagcagcatctagcctagaggarccctctgrggtaggtcacactccagttggagttgggtgtgttgcactttggtggggatcctttcgacttggacaggccaccccccctgccccatagctcatgggcatagatgcaatgcaccacagacaatcacctcaggtcacctctgatgaatattctacctgtggggtgatctgaccgcttccttccaaccaacatcatcttccatgccatgacccacacattaacctccagtaacattcatgtgtcttcttttgagaaacgtcttttcagatcttttgcccatttttaattagatcattagattgttcttcctatagagttgtttgaactccttatatattctggttattaatcctctgtcagatggatagtttgcaaatattttaatatttttccccattctgtgggtcgttttacactttgttgattgtttcctttgcagtcgtggctacagcattttttttctttcttaaacttttattttaggttcaggggtacatgtacaggtttgttaatacaggcaaactcacatcatgggggtttggtgtacagattatttcatcacccaggtatttagcatagtacctgatagttatttttcctgatcctcttcctcctcccacccttctcactcaaagaggccccagtgtctgttcttcccctctttgtgtccattggttctcttttatttttattttttttttgagacagagtttcaccctgttgcccaggctggagtgcagtggcatgatctcggttcactacaacatcggcttcccaggtttaagcaattcttctgcctcactctccggagtagctgggattacaggtgttcgtcaccacgcccagctaatttttgtatttttggtagaggtggggttttaccatgttggccaggctggtctcaaactcctgacctcaagtgatccacccacctcagcctcccaaagtgctgggattacaggcatgagccaccacatctggcctgattggttctcattgtgtagctcccacttataagtgagaacatggggtatttggtttcctgttcctgcattagtttgctaaggataatgacctccagtccctgcatattcatgttcctgcaaacgacctgattttatggctttcttatggctgcatagtattccgtggtgtatatgcactacattttctttgtccagtatactattgatggcctggccgtttagattgatttcatgtctttgctattgtgaatagtattgcaatgaacattcacatgcatgtgtctttatggtggagtgatttatattcctctaggtatatattccataatggggttgctgggtcaaatggtagttctgattttagttctttgaggaatcaccatactgctttccacaatggttgaactagcttacactcccaccagcagtgataagtgttcccttttctcttcaacctcaccagcatctgttatttatttatttatttatttatttttttgagatgaaaactcattctgtcacccaggctggagtgcaatggcacgatcttggctcactgcaacctctacctcccaggttcaagtgattctcctgcctcagactcctgagtagctgggattacagatgtgtgccaccacactcggctaatttttgtatttttagtagagacggggtttcaccatgttggtcaggttggtctcaaaccctcgacctcgtgatccacccacctcggcctcccaaagtgctgggattacaggcgtgagccaccatgcccagcctatttttttgactttttagtaatagacattctgactggtgtgagatgatatctcattgtggttttaatttgcatttctctaatgattagtgatattgagcattttttcatatgcttgttggctgcatgtatatcttcttttgaaaagtgtctgttcatatcctttgcccactttttaatggggctgtttgtttttttttcttgtaaatttaagttccttatagattctggatattagacctttgtcagatgtatagtttgcaaatattttctctcattccataggttttctgtttactgttttggtagtttcttttgccatgcagaagctctttagtttcattagagcccatttgtcaatttttgcttttgttgcaattgcttttggtgtcttcatcatgaaatatttgccagttcctatattcaagatggtatttcctagattaccttccagagtttttatagttttagcttttacatttaagtctttaatccatcttgagttaatttttataatggtataaggaagggagggtccagtttcaatcttctgcatatggctagcaagttattgcaacaccatttattaaatagaaagtcctttccccattgcttgtttttgtcagctttgtcaaagatcagatggttgtaggtgtgcagccttatttctgggcctccatgctgttccattggtctatgtgtctgtttttgtaccagtaccgtactgtttgggttaccgtaaccctgcagtagtttgaagtcaggtcatgtaatgcctccagctttgttctttttgtttaggacagtctttgctattagggctcatttttggttccataggaattttttttttttttttttttttttttttttttttttttttttttgagacggagtctcgctctgtcgcccaggctggagtgcagtggcgcaatcttggctcactgcaagctccacctcctgggttcatgccattctcctgcctcagcttcctgagaagctgggactacaggcacccaccaccacgcctggcaaatttttttgtattttaagtagagacagggtttcactgtgttagccaggatggtctcgatctcctgacctcgtgatctgcccacctcagcctcccaaagtgctgggattacaggcatgagccaccgcacccggccggttccatatgaattttaaaatagtttttcctcattttgtgaagaatgtcattggtagtttagtaggaatggtattaaatccataaattgctttgggcagtatggccatcttagtgatatttattcttcctatccatgagcatggaatgtttttccatttgtttgtgttactctgatttctttgagcagtgttttgtaattgtcattgtcattgtcattttatgaccctggttagctgtattcgtaggttttttattctattggctacagcattttcttaacacacaagtcatttaacctttctatgtcccgggttccacactgatagataattatatctacgtttgattgctactgcggaaaccgggtgaagtgaaaatgcccaggtctcaattgagcattgctgcttctcttgcattgacctcctgctcgagttatgcaggttatatgagggtttaaggaatttggctcagggtggggcaagtttcttttctttttttttttttttttttgagacggagtctcactctgtcgcccaggctggagtgcagtggcatgatctcggcgcctcactacaagctccgcctcctgggttcacgccattcttctgcctcagcctcctgagtagctgggactacaggcgcccgccaccacgcccggctaattttttgtatttttagtagagacggggtttcaccgtgttagctaggatcgtcttgatttcctgacctcatgatccgccggccttggcctcccaaagtgctgggattacaggcctgagccaccgcgcccggccgcaagtttcttttagtgttttgagtaacaacctaaaaagaatgttcaaggccctagctgagtgaaaactttcagaggaaaacatgcagctggctgagtcacagagggattaggccccttgtgtttttcagtcagaacagagaaaaaagcaggaagaaccgagagaccccacaacatgagattatgtatgttaacatttgttaccatttactagaggccagcactttaggtagagagttcaatggcaaagttcttattattctcacccattatacagatgaagagctgaaggatagagaggtgagctaatggtccagcatcacacagctggtaaattgtagagctggactttgaatctaggtatctgtcatcagaatccctgctctaaacaataagccaagtgttgcatttaacatactccccagaatataggaagcgctggagaaagattacctttgactataatcatttataaatgcacattaagtctgtagtaccattagatggatttgtttaaaattccttgaagtgccccagggatggtaaaataagataatgcaatctagcagatgttaagacacttaacagtgttaaaaggtggttttagtttataagacaagttgtataggcgtaccttgaagatattgtacgtttgattccaggccactgcaataaaatgtatatcacaataaagcaagtcagttaaggtttttggtttcccaggacattaggctgggtgtggtggctcacatctgtaatcccagcactttgggaggcccaagtaggcagatcacctgaggtcaggagttcaagaccagcctggccaacatagcgaaacccagtctctactaaaaatacaaaaattagccaggcgtggtggtgcatgcctgtgatcccagttacttgggaggctaaggcaggacaatcgcttgaacctgggaggtggaagttgcagtgagccgagatggtgccactacactccagcatgggcaacagaatgagactctatctcaaaaaaaaaaaaaaaaagttatgtttatactataccgtagtcaattaagtatgcaatagcattatgtttaaaaaacccaacataaacaaatactttttttaatataaatatgtcccacgcaatatttgggctatatttatactaaaaaagtatttgtttatctaaaatttaaatttatatgggccttctgcgtttttattcactaaatctgcttgcccttacttgggagtctgttctgtctttgctgaatgaacaggctcctgtcctttggtttctcactaggtttgatcaatgagagacatcagcaggagagaaggggacaggaaaagaaggaggtaggggtttattcttctccggtccactgcagattggcggtgttcctcctcatcggccacagctctggggttgggtagctgctccctccttgccctttcaggcctaggattggtaccagttccctgcccttactgaccctaggatactgaactatccctttttgttttccccaaactcagtccacacctttgtagatgagattccttattaaattcttgtcaaattgtccagtctgtgggtgtcatctgcttactgttgtacctcaactgataaaggcatgcaatgttttacacctgacatggtttggatctgtgtccccacccaaatctcatgttgaaatataatccccaatgctggaagtggaccgtggtgggaggtgattggatcatggggaatggtttagcaccatccccttggtgctgtcttgtgacagagttctcacaaggtctagttgtttaaaagtgtgtagcaccctgcccccttggccttgctcctgccatgtaagacacctgctcccactttgccttctgctacgagtacaagctccctgaggcctccccagaagcagatgccaccatgcttcctgtacagcctgtggaaccgtgagccaattaaaactcttttctttataaattatgcagtctcaggtatttctttacagcactgtgagaatgaactaatgcaatgtgtgaagacgatactgttaatatatctgttttgcagatgacaataaagagggtcaaagaaaggttaggtaggttgccccaggttttgctcctgctaaatggtgagagtaggtatcagacctaaatctgtctattccaaaactcagttcattactatactatgctttattaatgagctcgaggaggctggagctgctggatagtttccaagaagcttcactgtttatgctttcctactggcatgcagaggcacagacagatctgtgaggcagactacatcatggccccagttcagtttcttttttctttttttgagacagggtc

SEQ ID NO: 94025 - DNA, 13284 bp, Homo sapiens
catctttcctgcccccatccctggggccagactgtggagtttagcatgctctctcagttctcagcctggtcattccccctcgctttaaggatcctgccttgttcattcattccacagatatttattgaatgtctaccgcctatcagatcctgtgcctggggatacaacatgaaaacacacagacaaaagccccctgccccctggctcatgttctagtagggtaatagggagagtcgtacatagaacgtaatgaaaacagagtgtactagatctaaggtcataagcatcatgggggaaagtgaagcagggtgagggggatggaaagtcctgagagggccctgaggccagggtggctggagcggagtctcggagaaatgaggactgcggtcagagaggtgtggagtgggaggccacggtgcagggctgtctaggccattataaagacttcagttcttcctgagtcaaatacagagccgagtggagagcttttgcctaacaacttcaaggtctgaatcacagcttatcaggctgccgtgctgaaaacagcctgggttgggttggggtggggtaaccaatcaacctccctggccctgaattgaggggctcactgggatgtgaggtcaccctaaaacaaggaaatcagttttatcttttctcctcctttcataaataatctgtgtccccataacgtccattttaatgtatttgaatcaaaatatgcacatcctcataggacatacagtgccgtatgccctacattaacataatggcattatacaacaattctcatgtcttgctttcagtattcaacactatttttaagagccacccgcttgctgttcatagttctaggtctgtctctcatggctatacagtattccatggtacgcacctgccgcctttgacttgtccaagaccttgcttgcctccatcaacacagtcactcagaatcattaccaaggaatccttccgtaagtccattcatggacccaggtagaaatctctccggagagccacgcgcaagtggctctctgaatcaaagggcacacacgctgctaacttttaagctgccagcttcccttctggggtacgcattgcagtttgcaccaccaccagcaatattgaagtccaggccccgcatcactgccagcacttgaagtctggcaattctgaggggcataaggtagtgggtcttaatttacatttgcatttcttcagcttagtttatctcttgttcaccatttgggtttcccctgctgtgaatcacctattaatatccatggccggttttttcttttggatttcctttttcttgttgttttgcatgaaactttgtacattttaatcccttttcaatttcagtcactgcaaataccttcttagtctgccatctgttagctttgatgaacagaaagtcttactttagatgtagtcaaatccatcctttcccccttacatttggtgcttcttgtgaggtttaaaaagtgacttttaaggacaacttagaatgaaaaacaatctgaagctatgtttagaataaaataaatatgcaggaattattttctgtaagcagggcttcagaaaatatcaatctcactttgcctctattattactacctaattctgggatttctttttcctttctgtcaaggctgaacaggttgcgaaaaaaggaaaccacttgaggtaaacttggttttcctaagtttttctaaataaagctttaaaatgcaacactcccttaacaaactctggtggagggaagtgaacagagaactgagactcagaggcctgggttccatcccgcccttcacggcacattgcatatggttttaaaaccacacacaactctgcacatctggaaagaacagcaaaaattgagaataaaatatatatatattttagacagagtcttgctctgtcgcctagactggagtgcagtagcacaatcttggctcactgcaaactccgcctcctgggttcaagtgattctcctgcctcagcctcctgagtagctgggactacaggcgcccgccaccttgcccagctaatttttgtatttttagtagagacagggtttcactatgttggccaggctggtctcaaactcctgacctcgtgatccgcctgccttggcctctcaaagtgctgggattacaggcgtaagccactgcacccggcctagaatagattttaaaagatttctttcataaattttagaaacctaaagaggtgatttgtgaaagaaaccagattttcattagtttacaaatatttacaaaatactatgtactactcggtgtcttctttactggattataaatgtagaaacacggaaagtaaacacaggacctgtcatggtccatgttcaaggacatttgggccagaaatagatacactgatggaaaacagggccacgggaggtgggagagaatttaaacgtgtaatttgaacattaaacagccaggaacttccagaaaattctcttgtgctgccatgaccagtatcaaagaactttacaaggctgaggagagcccaccaaatgttttaagtgttttgagtctaaaatctgggtattaaagcttgggccaagtgggagaaaaagcaatcttaggaaaagaaagtgctaagtctggtccctggagtttaaggcttgtgtaatgacaggcaagaataaggtgattaggcccggtgcggtgactcacgcctgtaatcctagcactttgggaggccgaggcaggtggatcacgaggtcaggagatcgagaccatcctggctaacacggtgaaaccccgtctctattaaaaatacaaaaaattagctgggtgtggtggcaggcgcctgtagtcccagctactagggaggctgaggcaggagaatggcgtgaacccgggaggcggagcttgcagtgagccgagatcgcgccactgcactccagcctgggcgacagagtgagactccgtctcaaaaaaaaaaaaaaaaaaaaaaaagatgattaatattttcagaactgtccacttcaaactctgattctcatgaaggcaaaaagggtgaaaggtagtattcacactcccaattagaagcctgagagaacagcaagaacagctggcacaaggacgttgtagaaataacacaagagaagacccacactggggattctaaagctgctcctttgtgtttcgatggcgttgccaccgacaaacctttccccttccagtcacacaggggccactggaatcccaatcccttgacaaaacaccagatgcctgagatgtttatttgatgactggttgaacgggaggaaaaaaactccttttctctcgtctttggagttcacctacttaaacaagaagtctgtcttttgtgcctgtcaccatcgtgttctgtgaggaggtttcagtcctttactcaaggcagaaatccttcttaagccttgattttcttgtttgggcctcttacatgaaacagacacaggctgttgacagaaatgttgaagtggccatgaagtctggagcccggatgtcgttcacctgccaaacagtgtcaagggtgaaaggcaaagatcgaaggccaaagtgcccctagcgtcccctgcagcaggtctcagtcaaccttaatagatctattaatagaaagaggctggactgcgcaagggcagggggactagcctggctaaaagcaaaataaaacacatcaacagacacactcttcttttgttaggaggaggtgggatcacaggcccacatgctcccagacgaggtggggccaggaagactctcacaggattgcctttcatgctgccacggatggatgctccaggcagatccactctgccaaggcgtgctttgggattagccgggcactcctttgtcttttcatgacgtttccaaaagaagacactgtgactctgacagaggtgacctgcacctcacgaccccctctgtgcaaaccattagcatttccggatctcaaaaaaaccaaaaaaacccacagggcacatgccaattcataggacaaatggaaacagactgaaaacaaaaacacagaaccatggcttttcagacctgtcaacatggttagtgttggaaataggcactgacttctcttccaccaagtggaataaaaatttagatgtcttttaacatcttagatattttaacgtatttaaagtcaggcaaaaagccctatagtcattgcactgcctcaaaaattatttacgacagttctatcttaatgctgtgtcctgttttcctagcgatcaatggcttgaggacctcccttgagctcactttgctggctctgttctctcattttgtttttgcgcttccctctcctctccggcatgtctcaggcctttatttttgttggtcctaacagctggtccccttcccttcccatctgtctctatcatctattttcaggttatggctcaggcccaccttcctgctccaggagaacatctatgtattctccaacggctgagaaacatgctgagcgtctaatgtcatcctccatattggtaacacgtaacattaataatgacagtcataattttctggaaataagccaaaggttctaagcttagatcgaactgcaaaacagtgtaacataaagtcagcatttgctgttactattaaatacataaaaattggttaattttattacttttccttgtctatatacaagtaggtacttaaaatggtgaccttataaacagtcatctcagagtggcaattattgttggtgaatggcttaacgtcgtgggttggtcactacttgtgaaatatctgctttctgagctgcagagagtgtggacgccctctccacaaccccacacaattgtgcttcactgtatgcacacccaacacaacacatgcaaagagtgtgcgtcagactcagacaatgtatttcactgaatttggactcaagttcaactcatcattctaatgagtaagaagattcaaagatgacaaggaagcaagcccacacagtctacgggccatgggatgatgaactttcgttttattgatttttcagtacccaagtgtggcactgtaaggctgccacatacagcaagtgacatgacaccaaaaggaccttccgagagtattattcttactttggatggaagacatcgcttaaacaaaaaacatttaaagatgctcccttgctttttataattcctaactgtaaaatataattttagtacagaacaaacaaattctccttggttggtcacatcattcattattgaaagggaaacttagtatcaaaagaaacaaaacactgaaataaataactaagtaatttactgaaaggtagttttgttgcattgcacacaactgaccgcagagaattctaaagctgatttttttcttaaaggatgaaaaactcatttgccatttttagtttcttgctaagtgatacatgctccttataaggaaaactactctgtgtaggcctgagtttaaaatgtaaatatctgtttatccagagtttgttaatctagagtacacagatgtggaaaactggtggtgaaaagagggacctacccagccttcagggtggctgggcaggggccccatgttactggcctcagccaccagcagcgtcttcactccgcccaggtcagaaagcactgcctaaagccggagcttaggatgaacatgggcaaaaagcactggtacagttccatgtgtttctcttctactgtaatgtccccagagggattgtgaaatgtctgagaacatcccctggaggaggtttaaaagtgagaagcccatgatatggctatggaacataagcacttattgctggcatgtttctaccaagattgaacacaatgcttttctttgataaagctttgggcaagttcctagtccaatttcttctgctacaagtacacagaatttactgccttcttggtcagctcttggtatgaattcttctcttgaattaagatcctccctggcttgtctctcacccaccctgtatctcttagagaaagcacctggctgtcttcacctacgcgagaccttctctggaatgtgatttgctgcgactgcagacatctccatayggcataatgaactcccttgagtggtctctttttaaacaattttgggtgaggggcaggtttcttggtttgtttcaaaactcatcttgaaaataatctagacggaaaaatccgaagtgaaattctggtgcaacaaatattttaagattgaagtttggttacttctcttgtccatcttttcgtgcccacaaatggaaactacattcctgatttaagaggatgcttctgtctgtatccttttttgaactgcattgttctcacaaggaccagcaaactttttctgtaaatattttagtaaatattctaggctttacaggccacatatagtgtctgctgcatattcttcaacgttttttcttaggcaactgtttaaaaatggcaaatccactactacctctcagctggagcaatgaggttttctcagcccttgtttcaggatcctcaggtatgtgactaactcttctatgcccagagctggaaggcggggtcccctaactccctgggtgcccacctgcccacttcaaccatttgtggccccttcctttcctttcttccctctctgctgctgacaccagtggctccatcgccagctccctgmagcctccaccaataatccatggctcctccaggaagtgtcgcaggcaggtggccaagaccaacttattaggkagccagaagctcacccctttcttaacaactttgaccacgaagcgcaaatacgatgcaggtaaatccagaggcagagcctgggtccccaggctgctggtaacacgctttgaaatccaggtgagggagccatgcccccacagctcttgcctcaaggatcagatgcattttaccttccagagacgcaggttargctgcacctgaggcagtytgagccacaactgggacagaattcccttggtcttctcttctgatccctcagcagaactgcccctaatgctcagttcatggcaatacaggccttttctctcctgtttctccaaactctcccagcctctgcccagtacctagttccaaagccacttttataatatcctcagttatctgttatagcaacaaccccacttctgggtactaatctgctaccaactacaggaatttaactgttctggagttagggaacagcacacacagacactcrcacaaaacaaactccacctaaaaaaactgtacgagaattccccaaacttctcaactaaataaataggtgaaaaaacaccaatctcacatatgccaatccaattgtcctttttagattttggcttaaattgtcgaattttttccttcaaaatgtgaatttatttcctgtattggatgcagactcttcccttctggatttacagtggtgctgccagcaacagcctcagtcaatgcggttaggaagaggactcggcaggctgtgcatggggtctcccagtacgattaaaagctgagatgacttttaattaaggggggtgggggaaacaccaattggaagctggaagaaactgaggcacgattaagcagaaacactgaggaatactgagcaagaagtgggcatgtgctctagttccaataaaaccgaaactggtgaaactaggaatttccaattctttcaaaaccacagtgttctaatgccactgaaatatggaataaggagcgtaattacctgcggtcaggaaaagataacagtaacgaggatttttctaaataaaatgtaccagtaaattctgaagtgtgtgtttttaaagaaccagcattgcctcccctcacgctggtttcttgggatttttcacacactcacacaaagctgtagtcgatagttcactatcacttttataaatggttatctcctggtgcccatgtttctctgttttggatataaatggtttaaaaaatttaaatttgcaaagaaaacatatacagtaacagacctgaacaataaataaaaaaaaaaatcaccctcttcaggttagagctttcaagatagagaaaaaagaggattatcatttcaggcagtaagttttttggttctatgaaagcatcactattcagtcccctctccactgacagaatgcatctttccacctccctccagtatcaaagtgcatgtgtttaaatttaacattccttagagaaaccccagaaatctcatttatttttggcagatatcctgtgcagcaaaaatcaagtgaatttccctcttccccactcctcaatttaatgctgtactcaaaatggctaaacgcaatacttctagacagcagggcttataaacaatgcatttttttttttttgagacggagtctcactctgtcgcccaggctggagtgcagtggtgtgatctcggctcactgcaagctctgcctcccaggttcatgccattctcctgcctcagcctcctgagtagctgggactacgggcgcccgccaccacacccagctaattttttgtatttttagtagagacggggtttcaccgtgttagccaggatggtctcgatctcctgacctcatgatccgcccgcctcggcctcccaaagtgctgggattacaggcgtgagccaccgcgctcggcctgcattttgtttttgtttggaggaacaaaaaagggaaagaaaaaacaaaaccacaggaaaataaagaggagaaaccctgaggcaaaaatggcttttccttttgagtcttcgtggagctgtgagctggatcacaaggtccccggggcattctgggcgggaaggccctcctccatccagagggcggcggccgagctgctccggggagtgcgcctgtggatgcgccgcagccgcagcaggtacagcaggatggccagcagcaccaccaggaagcagccagagaacaggtagtggttgtagacaaaggaaacgccccgccagtgggtgtgactggctcggaaggcctcctgctggatgtctctgcccatgtgaacaccaaacaacaaacaggacagtaagcaaggaaaggggtggaaagggtgcacagggggacggcgggacccaggccccagagctgcactttaggaactgcaaccctacctctgaaatggagaacggaacagcccaatgcagggggcttctaagtatcagtgagataacatgtgaaagtatactctgaagtcggtcattataatttgggcaaccaaaatcagaggaatttagaagagccgtgaaggtttcgctgatacaaagaagtcaacatgtaaacaaactgcatgcttgtgatcagtaacacccatgactcaccatttttacagttaacccagttaaaagggttgctgagaaatgctcaattaaatggagggggtggggggaagagcaaatgtctcatctatcaggtaactcaggttcttagcacaggtcaactgacagcagatctgcaaacgtgaatggggaaaaacgcacatctttgttctacccaagcgctgactgagatgtagcatttctttgaccatgaatgcagacaacaaactatcattagcgttggcagcacctgcaactttgttactaacgaaaatcacagatctttcatgtcccattatggtatcatcaatgcctcaaaatatcattgacgctcattgactacactgaaattacagaaagtgctaattctgctgccagatcctgttatttaatgtgttaatagagaagaacacatattacagtatcacaaacttgttttctgtaatattttggtattatttcaatatgatggtttcttctgtaatcctatgtatttatacatgcatttaaacagtatttggagaagaggcctgagtcataaaggttaagaaccccggaactgacccttttgccggggctggggaacagacagttgagaataaccaaacacagggcagtaggacaggagtgctgtgtattacgggatggtagggtgagaagggaggaagcacttgtggggagggggcaagaccaaaagcaaacgtcactgtccctacaattctgccgtggccggctctaacagcaatgccccaaacagccacagaccacagctgccatgaggtgctgtaactgcagaaaagcatctttttgattctcgttcccaaattcacagccctaccttaatggtagaaagcgggtcctgtagaggatggctccaagggtccactgaacctccttgtcgtaaacttgcaaggcagtctttaagcttttatagttgacaggaaacgaaaagcccctatgaaacacctcaaacatccaggccgatttgaagcactgatacctacaaacggcaagcacaaaggcaagtcagactgactcactctgtcaagatggcacacacacacacacacacacaatccttccctctgtgggcagccttggggcaggggcttcctcaggccggctctcccaaaccaactgcgcgcgtttcaaggttgatgtacttgcttcacatccctggtcccacaacatggagcagttcacctgtcaaatcaatcagtgcatgaacccggtctcggcataatgtcatatatccctgagataggtttcttttccagctggcatttcaccatgtactccttgaatgaatactgaacaggttccaacctctttgtacctcagtttattataaaatgagatggtaggaaggttctcttcagctctgatattctatgactctaaatatttattagaggtttattttttgccaagcactgtgctaagcaagtaataagatacaataattagtaagatacagtgtctgcacttaagtgacttacaatgaaaggggatttttaaaaagcaacagaaaaagcagaacatgataaatgcattggcgaggtaggatgaattcttgagactcagagaaagggatgaagtctgattgaggggacagaggaagactggaaagggacagcctctggctggactctgatgtctgggcaggacttgaacaagcaaaggtatgaacaggggaatttcaggggtaagagacagtaaaagtgaccaaaacaaaaaagatacggaatatgtctgggcacaagtatttgtcccgtttgaaaggggcccagggtagatgggaagaacagtgagtgagaagaagctggactgaggccagggtgtggcaagccagtggggccaacactgcattatggttcttaagagtgccctgggcttgaccttctagtacttacttaagcctgtggaggtcagcatgagaggcgtacagtcctcggtcaaagcgttcccgcaaaatggaccactttgttgcacaataatcctgaaaacaaattcaccaaaatagatcactagtaaaggcttattaaaattctcactttaaaaatggtttaccaaatttatatttgtaacaagcatatccttcccattaggaaacacacaagcttaacttatacaacaaatggcaagacacacaaacactcagggaatacttactgattcgcaaacacaatgccttgccttaaaattctgtccagggtattgttaaagagagctttgctgtccacaaccaacctctccaaaactgtttagtttctccctccatgactgcatggtacgggcatacatttttggaaaagtgaagcagtattttagctacttcaaactaagtcctacatctgtggaggacacagtacaagctactgggataataactgcaaaaggtttttgtctttaacagaagggaaagagatcccacttttcttgaagttatttgttataataacttttattgagcattgtgtaagtgtgtcttctcaatgtaatacttaactcctcgaggtggctaccatcccgacctctatttaaaggatgaagacactgctgagaggtgggagatgggcctgggtgtgtgacagggagcacaaggaaaaagcacttggcctggggaacgggctcggcataggcacttcaggaacatggacatggacacagagaagtcgcggagagcgtgagggaagccagctgtctgacatgattacagcatacagtgctctgcgcttcgagatgggtttgagaaatacttggaagataaaataccacacttgtgactgattacactggggtgtatagggagagatgaaatggttagagggagaagtccatgactcctaggctgcagggaaggggactggatggttggcgatgccattaaccgagagaagaacaggaacagaatggagagaggatggtgggtttgtctggagttgtggaatctagcaggcaaccgggcaggggtcaggattggagcctcttcttgagaggcagcagcaaaccctgaatatggatgagaccatccaagaacctgaagatcaggggccaagtgtggaagtctggcatcacctaagtttaaggggtgtcaggaaggcagagagaacacaagaacaggagtatcctggcaggtcagggagggggaaggctagtaggagaattgtcacatgcagcaaagcacaaaaatgacataaaagactgtaatttggagctaactgatgaccagggtagctaatggagtggtgcagaagtcagcgtacagtacattttttacttctgctgtgactattcaacctccctccaagcaaagggaacaggatcccaacatgctgcagtgcagccttctatactccgtctttccctgtcaatgtgaaaggaggacataacccgtcaccgtccacactggtctctcaaaagcatgcagagcagacggcgtctctcaagggtacctttgcagctttagtaaatttagcagcattgtagtctccccccattcgtaacacatcctcggtgcagtagtagaattcggagaagccatagaattcactgttctggaagtgaattgggggctggtagaccccattgagggaagtctgggtctcgtttgttttattcatgaaaggctggatagtctctcgacacaggtcaaagtctccagtccctcgtaggtatatggtttgtccattttgctggatttcatctttaatgtctaggggtaggcaggggtccaagtacggcatatcaggagtcagaccagtctgtttacccaggagcctatggcaaaacaagaaacttcatcgtgagtcctacagaaaactgtgttttcaggaagtggctgcaaaccagtgtttctcaaaatacgctctgtgggacatgagacctgcaggaccgtgtctgtggaacagaaaagggttccgagataattagttaggaaaatacacacttgagactttcttgg

SEQ ID NO: 94026 - DNA, 13821 bp, Homo sapiens
cacatatttgggctttcccctagccaatcaggaagtggctcacagggaggacccaagaggcagaacctctcctccgccccctttcctccccagagccctgggctcctaaaagagcatggctgggaaaagtggggacggaggtcatggctgatgcctgaagacacctggggctgttacccttccagaggccagggctggcttcctcttcctattctatctgttggtcctcagcaagcccaggaagcagcctcatcaagtgtcttaggaagcatagaactcctgaatttccttctcctaagcttttgtttctgaacattacagggagaaaatgaccatgcccctgggtgttcctcctactgcttctgcttgattttatcaataaggatctggtcagctgagactgagaagaggcaagaaactagcacctctgccatttccttagggcctgcagtcctaatgtacctggcacgggaggggtttctgagtcagggaagtttgtggagaaagtgacatgagctgaattttgctaattgataggacgagtctagggatcttaaacccaaatgcctttagggtccaggcaagtcacagatataagtgatgacgctcagtgtaagacagtagggagtagtgtgggctgtagaaaaatgtagcatatacaccccccaccccgcccccacaacaagaggacacagatacttcccaactccagcaatgactatggttcactgttaccagatcttctgactgtttagaaggagccagaaatgaggatattttataacgactagtctcttgagttttaaacagtagcctctgattttaaaaaggtcgaacatgcaagcccctgaacacatgtttaggctagatatgacccagggctggcagtgtataaactctgaagtcagcaaatgaaaaatagaacaagggattccagagagagggcacgatatttaaagacacaggcttgtgaactgagtcacgcattccagaaactgccccttggtaggaggtggatgtgtggaaaagaagatgaggctgaaggggcagttcagaaagggtctctgtgccatgctaagggatctgaacctcattctgaaagctgcaggggtcggtaagagagactgaagagtttaaaggagagagaggcatgtggcacactgcatttcggaaagctgtgtctgtgtagggagggctggcagatcagcagtctctgcacatcgcagataagacggaggcacaggagagattcatggcagagggatgagggcactggcactcaccctcaggtggacgagctcaaatctggaggctgggggacacttgaagggggggtgggggtgtggtgagggagagtggggagtgtggacatcaccctggttctgaatgaactaggggtggctgccattccctgagaggacaccgggagagacaggtggaaggggtggaggtgggtgggaggtgtgtggaggcagccaggttgtgctgtgactggagccgggagtgaggtgtccagaggcagatcagacaccgagggacaatggaagcagggtttggaaaaccggcgcgtgcaaagggcacactcacaccaaccccagcatcctgaggggctgggaaagagaaggtcaaagaaaacccggagaaagtgttgccagaggatgaaggaggcgggaagtctatggcctaaggggtacttcagggtcatgctcaggtcactgacagagcagagagaacgtgccgttggacccgctccaggagacatggggacatactgcaagggtctccctgccagggtcccgtcgggattcagtcctgcacagccccgtggattgtgggcaggccttgcccacctcctggccatgtgatcttcggatgtgcctcttgtgctgaagaaaaaaaaatgcacatgtccactccccagcaggccccgctctgaacgggcccccagcactccatccatgaaagctgcaggggcaacagcaggtgcctgttctaccacgctagcacgctccactttctctcctccactgattcttatttctccctaatggactgcactcttcaaaaccaacttacccaaggacagcttttccaaggggacttgtcaaactccacaggcagcaactggtttgttcctttccaaagggcagtagccatcaccttcaacaatactgcaactaacatccacctctgtccagtccttcttattttaatcctacagcaggaaccccaattgacagaggaggacatcaaaactgagagaggtctagggctgcaaaactagaacccatcaggaaccagaactccagtcccctctgccggtggtcccatccatcctccttccatctgacaccaaggcttcctgagtggtaaccaccatggctgctggagcagaggaagtggccgttgccttagaaccaggcaggtggggaaggggacacatcaaatacccagaagaaaagtgacttcaaagtcctccccaaattgagtgccctccagaaattctctcacgaagaggctgcagctgacattcacagggatgttgtgtctgaatgcgggtacatcaggaagggaacaaaagagagggaagaaagcctggttgaaggcaggggtctttcaagtcccctcgaggcagactcaagagcaaagcatggcacactggatgggcgttctgcttctctttaaagagcatggatttatccataccatgtgacatgaatgaaatgaggagttttcagggctgccaacctcttggttaaggttctgtgtagtatatttctcctacaatagaaaaggaaaaatgacatctgaggttaacaatgtatctgcagtgcaaggcccagtgactgtcaataatggacgctgagtaactaagcaatggcggattgcatgaattttcatataaaactgctcctatacatcgctttgagtgtctgggtcacgccttatccttatagtgtaatgtgagcggagagtctagcttgaatattttcccacttagctaacttgccatctcacaactatttgctgagtaacccttgcttcctcttaattctctggggcctcctcgacatatatttaggcaggaggtgaagggcaggacgcagggggccactttctgcaggcataggaggttgggcttcatgcagaccacaatcaaatccttgctctgctgctttgcttgctgggtggccctgggcaaatcacttaacctttttgagcctgggtgtcctatttccaaaaccaagtcagaaataagaaagttactatgggcctggcatggtggctcacgcctataatcccagcagtttgggaggctgagcccagaagatcacttgagcccaggagatcaacaccaacctgagcaacatggcaaaacccaaactctactaaaaataacaaacaaaaaaaaaatatggggcatggtggcacacgcctgtagtctcagctacttgggaggctgaggtgggagaatcagctgagcccgggaagtcgaggctatggtgagccatgatcacgccactgcactctagtctgggcgacaggagtgagaccctacctcaaaaaaaaaaaaaaaaaaaaaggcttcggtagagtgcctggcacatggaggggctcaagggaatgaagttcttaatatttttaattgatgtcttggaatctgcatccatgtctaaggaagagacaggcaagagaatttttgtcctgtctgggacaagaatgatcatttgggatggtggaggcatcactcttacagagtgaactttgattgagggggagagaagctgtttagtttgaaaatatatatgtatatattcaaacggtatagaaaaactgtagaaagtaatgctgaacaaaatcttgttgggtgtaaatacagagaaaaatcacaatttttaattgtggcacctctgccaggggaacagtaggatcaaggaggaattttatgccattttaaatgaagtcgtaaagtgttgtgaggggatgacgtaaaataaaggattttctgggccagaaggctcttaaagatgccctggggactctaacccatcccttcatttgggatcctttgtcatgtctcttagccgcagcatgtttcctccagggggtgcccaaggggacatttgcctccccactcccagagagaaggtctctccggggccacgtgtgagccaggcagaaggtgggaaccagacccagggagccccagttcacctctccaggaaggagggagtggccaccctcatccaacaccgatgcggttccagccatctgggggctgaagaatgtcattgcaaggtggccatatcagagctctcttggtacagggacaggaacacaaaccaggcaggctcagaagaagcagggggtggagtgaggaaacagagacaactagtgtagacggacctgagaaagtttgcaaagagctggcgagagagaaatcgctgaggggaatatggacttctctgaatcctgttttctacaggagagggtcatcttcggtgatttgggctcatctctccattgagtggtcctctctagaacacactgggtgtgcgggaaatacaccctcccacagcaacgcagagatgagcaggacccgcatcctgtgcctggccatggtctggggagggggtgctgaagccgaacgcatagagataatggtggctgaatatagggggcacccttctgcaggtatgtccaggacgccgaggcagggtgagaggcccaggctcgttgtatagtagggagctccaaaattgggatgggggaaccagcaaaggctctatagccatgagcaccatagagaagtagtcctctctgcccacaacttttcactaggtccagttcaaccaacagcatacatatatgtattgccctgggttttaattgctttggtttctgggattttgagtgttaaggatttcagaatgcagcattatcttagaagtctgttttttgttgttgctttgtttgtttctttgagatagagtctcgctctgtcgccaggctggagtgcagtggcgcgatctcggctcactgcaacctccgcctcctgagttcaagcgattctcctgcctcagcctccggagtagctaggattacaggcgtgcaccaccacgcccagctaattttttgtattttgattagagacggggtttcaccatgttggccaggatggtctcgatctattgacttcgtgatctgcctgccttggcctcccaaagtgctgggattacaagtatgagccactgcacccagccagaagtctgtattttaaaggctgtctcctttataagatgggtgcagatcagaggacgagtcctgcttcagttggtagtccctgtttatgaatcctttctggttggcgtttctgttcacttggatgataagttatattgtccccccgccggttataggtgacccacagtttcattatgagaaagaggaaggatcaggaacgattgcagtgagaaatgcttggcatccaggtgacttgtttacttgcattttgatgtgcagatgcctctaagtacctttatgtaaagactagggaaattggctggaacataatgaaagcccaaagttctcagggatgttttctgaagttgagcaaaggagagagccaagggtgagctggtacctttttgtacaccaataaaagctgattaacaagcaaaagtttgctggaatcgaagcaaaaagataaatccaatcaagctaatgtttaaattgaaggcagaagggatggcaagaaaagaactgagcagtcaataaggagagctcaggagtcatcataaaaagagagacacccaaaattctccccattggcccctgcaacaccctcagacgcccaataccagagatggcaactgtcatggaaacaacactatcaaggctgaaaccagcataggtctccagagctgctgtgcccagcggtgtctcagtatctatgaggttcaagagcttcagtacaaggctaagacttgctgtataggaaaagtatctcaaaggctgttgagcacctcaataaagctattccgcccgtcttggtgagcaagaagctgtgtgtgtgaaattgggggacagtaacaaactggaagaaggcatgaatttaaatctaactgggaacacatctaaattgggtgcaaagaccttactagaagtgctgcttgctgtctgtgatgttgaagctgctgcaaggagccacctatactgtcacaatgggtcctggctggcaatccaaaagtatctagccaatgccagctttcagcaaggtccatggtagttttcacagtggtaatgggccggcagtgcaggagttcatggttctccctgctagaaccgtaacctcaggaaagccgtgctttaccagaaggatgtcatcaggcagaaatatggcaaagattcctcctagtgaggacaaggggtgttttgcttttcacatcgtagagcaggaattagcaaatattggctcacaggtgaaatccagccagctccttgttattacatggcttgtcctccagccaaaaatagaaaaattcaaaagaagaataacatcagtatcaaatgatttacaataaatcaaacactgttcttactctttgcattcattagctcatgtgatctttacaatgaacccatgaagtagatactattactctatagatgagaaaacagatggaagcttctagataggttaagtaatactcaaagatcatacagataatgatttgttcagctataattacagacccagcgagtgttagctccgagcttactctcttaacgtgcttccttgtatgaaaagttccccagtgctttaaaggtagaaggtaagttcctaaagagagattcaggtatcacattctggtgtgttcacaagagggaagataacagtgtctcagagaaccaaggaaaggctttgtagaagaacgaggctacctttccgtcatgatggctggaataataactttgaatcctaattaagcaaaatcatgtgccctcccccacaaaattacattattctcattaccaggcctagtgaagttttttatgacaaaaacgtggtctcaattatgactatagcttaaattttgtcaataaattattggtagaaacttattttctctcttgttacttaagtacctgcatagtaccatctgtttttcctcttgtcccatacagcctaaaatatttacatttggcctctttggaaaaagtttgctgactcatatcctagagaatacagaacactggagctgctatggaatgtgattagaaagcctgrctgtattataagtagtgaatggcatggacaatagcctctagttcttacagttcaggaaatatgaccttgatgttcaagcctccagatgtccttagcagttacatcacttctgaccagctggtaggcaggtacaagtccttcatcaaggactactcrgtggtgtctactgaagatgccttggaccaggatgaccgagaaacttggcagaagctctctgctagtgcaggttatatccatgtgacagggaatcatctccctgtgcccagccggaaaggaactaccaagactacagacaaggactcgggcaactgcctcctactcaaggtgaatcagacagaccccatgatggaatctcttcaggagtgcaaagtggcccaggccgaaggatagggcgctatttcccactgtgttggggtgactgaagattcttgcattgccaaactcatggtgaggatctgtactaggtcaaccaaggctgcggccccttgcccatctaagcacttggccaagtacagccacctcctcaggtggaaaagaagatgggtagcacctttggttgttctgcagacaacaaattcaaaaagctcctagccaagtaagttctggggcaggcgagtgcctgagccagtcaagcacttgtcagctggtgggacctctactgctattctaatcatctgtgctcaagactctagacactaccactttggaggggtctttccttgctcatctctgtgatgttctgcctccttagaactgccgtatcaacttctgcatcaaatgccacatcttctgatacgtgctgtgtgtcagatgagaccttgaaaacatatgctaagtgacagaagccagacacaaaagaacaaatagtgtgtggttctacttacataaaatagctaaaataggcaaattcataaagataggaagtagatagtagttatggggaaaagatgtaaagagggagagtttttgcccaaagagtgcagagtttctctttagatgatgcaaaagttctggagacagatgatgcttgcacattatgaatgtatttaacaccacccaactgtacacttaaaaatggttaagatgggccaggcgcagtggctcatgtaatcccaggtactcaggaggctgagacaggagaatcacttaaacctgggaagtggagggtgcagtgagctgagatcacgcccctatactccagcctgggctatggagcaagactccatcttaaaaacaaatggttaagatgttgtcttagtccattttgttttgctatgacagagtatcacaggctaggcaacttagacagaacaaatttatttctcatagttccggaggctgagaagtccaagagcaaggcaccagcagggcagggcccagtctctttgcttgcaagatggcacgttgagcactgcctcctccaaaggggaggaccactgtgtcctcacgtgacagaatggcagaaaaaagtgaacccactcccaaaagtcctctttatagtggcattaacccattcatatgggcagagcccttagacctaaacacctgccattaggccccacctcctaacactgttgcattggaggttaattttcctattcgaccataaattttgaagggaacgaaacattcaagcatagcagatggtaaatttcatgttatacgtattttaccacgattttaaaaattgggattcaggggaagaattcttaaaagccttcgaccactgttgacagccctggttgtagtcatgtgactgaccccaagtcatcctgttcctcacttttctcctgtccatgtgtccttggagtttgttcctgggctgtcaacaggcataaacctcagtggctttaatgtgcaaattgaaaaaaagcattcattagtctcccaaaaatgtgaaggaagaaccatctgcaaattcatgaattgtgctttagtttcatcttctattctcaagactaatcacctgtttaagttggctctagactcttaattaaaattgtcagctcctgaaagttcattctgagcctgactctcccatgagaaactgtaaacgtgggaaattctaacacagctaggagattccaacatactggaccttaccttacctataaataactgggcttggtgtatatatcaaaatatcatgatgtaccccataaatatacacagttacgaattttcaattaaaaaattattaaaaatgaaataaaataaacaattgggcttggatgaagaggctaagcaaaaatgcagttttcaggttttgctacttgcttttcactagaatagatccagctgtgtgtggtgtgattttgttttacatttttttaacataccatttttatttactatcatcgtttactgtgtacattctactaggagagaatataatgtccatagtgtgaaaaaaagtttgacattctttttttttttttttgagacagagtcttgctctgtcacccaggctggagtgcagtggcaatctcagctcactgcaacctctgcctcctgggttccagtgattctcctgcctcagcctcttgagtagctgggactacaggcgcacgccatcacacctggctaatttttgtatttttagtacagatgggattccaccatgttggccaggctggtctcaaactcctgacctcaggtgatccacccgcctcagcctcccaaagtaaaaattgacattctaaaatgtagacctttaaagtcgtcaacctctacccttacaatggttgagaatattgcagcagggtcaaatggacagttgttattactagtattataccttattctatagagttctttatagtgtgcaaaaagtatccccatatgttttctcatttggatgatctaagcatctctgtttctacaatttcagcactctataaattatctttagcaaatgtttcttacccgatcatcttctatcaatcaaccaggcaggtatcagcagttccccatcgcaaggaatataagcttattttaataacatttgaggcaaaacctaattagaaaaaacaaatccctcatcaattcctgtgatttattctagagccaaacatctgcagcccagtttctttgaatgatggtcttccctgttctatgaacaactgagaggtgaagcagtgtcttgtacaagtgtaaataatgtgcgggaacacagcacataaactgcagggacgacttcagaagaaaacccccacttaactcttgaagcctgatttgcttcactgagtcccaatggggcaaagcactgtgcaaggctaagaaagtgaacaagacaggcttctattctgttttactgtaggttctgttattatttaggtatgtcaaggccaacagatgaagcaatgactgccacgaagaagatagtttgttatactcacatcacggggctctacacaaggagatactggggttggtctggaggcaggaggagggggaaactggtaagagcctttattgtggtttgcacaggaaagaatgggcacggtggggccagagcgggtctaggattggctagtttgagtaacttcagcaggttctgcagggtgggagctgtcgctagttgcatggtacctagcctagggtacttagggtaggggaatacctggccctacaacagggcaggggaatactggcccccagtaaatgagacagtaggggtgtggattcaagattgcaatttgacaggagcgttcccaggaagagtcgtttgctgtctctagaaatcagctaaccctgagaggggcagtttctccagcgtcagaaaagccccagatgtcaaagcattggaatacagaaaataaaagacatggttaacacgccccctcgaggacttacactttattgtggcccgcaggaggaagccgaacctggcacacaaatccccaggccttggtctctttgactgtatgaggaggagttcgaattgtgtaaatgacaagattttgtaaagcctcccatctgtgattccatgaagtaattaaatatgagaagaaggtggcaaatgctataatagaattgagtgctttgggaaaaaaggaaatggcagctgagaattgaaaattgggatggtttggaagggaggcaccgatgctgggttagggggtttgcatggaaagatgatgtggatgggcgggctggtggaaccgggggtgaggcatgggggactcctcttctgagaggcaccaggcagaaaacaagagttcaccggcaaagaaatatctccaccaaaatatcgagtgccgaggttgagaacccctgagtttgagtaagaactggcatggaaaagtgcatggatttgtagtatcccaaatcagcgagatttgagttctccaggacctggctggaagcaggaaaagagaaaggctggagccagctatttcaaggcatttggtctcctccaagcctggctctcagggactgggggtggggctgtgaggaggggaggtattgggcaaagtgtacaaagtttcagacagaagaaataagttctagaggtctgtacagcataactacagttaataatactgtattgtgtacttgaaattgctaagaaagtagatcttatatgttcttaacacaaaaaatggtaagtgtgggctgggcgtgatggctcacgcttgtaatcccagcactttgggaagccaaggcaggcagatcatctgaggtcagggggtcaggagttgatcaacctggccaacatggtgaaaccccatctctactaaaaatacaaaaattagccgggcgtgatggcaggcgcctgtaactccaactactcgggatgctgaagcaggagaattgcttgaacccaggaggtggaggttgtagtgagccgagatcaggccactgcactgtccagcctgggtgacagagcgagactccatctcaaagagaaaaagtaagtgtatgaggtgatggatatgttagttagcttcatttaattatttcacaatgtatacagatatcaaaacatcatgttacgcatagtatatatacacagtttgtttgtctattatgtcttaataaagctggtgggaggttgggcacttggcaaaaaaaaaaaaaaaaaaaagcaaagattaatgcatccctactgtctcttaagctatactccatgagcacggggactatatatatctagcttggccaaagcctgaaatataatattactcaaaatatttttgttgaatgaataagaaaaaaataacttagatatattggtatcctcatccagagccaccttagatttcatgaaagaaactgggtttgggtttgttgaggtttgcttttagtacaagccaaattttggatttttataaagttaaatctgtcgacatttttttttgtaatttcttctttttcttctaaatttaaaaagtccctcccatacactcctcagccctcatcaaagatttgatgaatatcctcttccctgttcttaccagtttcttgtgggtttctttctttaaatattcaactgttttggccaggctggctgggtgcagtagctcctccctgtaatcccagcactttgggaggccgaggtgggcagatcacctgaagccgagagtttgagattagcctgatcaacatggcaaaaccctgtctctactaaaaatacaaaaattacctgggcgtaatggcaggtgcctgtaatcccagctatttggaggctgaggcacgagaatcacttgaacccaggaggcggagtttgcagtgatgcacaatcacgccactgcactccagcctgggcaatgaagggagactcggtctcaaaaaaacaaacaaacaaacaaacaaaaattaactgtttcattctgtctttctcagagggtggtgcaggtactcctggtactcgtcgtgataatgtaagattatcttaggaattctattgataaatattcttgtgttaatggtagtgtagggtttttttaaataactttgtaatcaagacatgaaacctgatttcacagaggatattgcttagggtaagggtaagtttttaaagatgggtctgttttaaaatttaagtggataatagtgtgtgcagttgataaatatgaaaaactggtgatagggatctgaaaattactaaagtttgggaaacatttgttaaatccgtgatgttttttctgtctagagtaaggtgacactcaactgtttttctcccaactcaaccaccagatcattaaccaactattccaaactatttatagaattaactctgcttgacttaatgtctggccaagcaggtctcccctctccccaaggagggctgattttgagggttagggtccagctggtggcatgtgagcagacagtgacccacgggccatagcacatccagcaatgcccttgggacccaacccaggtgaatgtgggttacaggacaggagctgacccgacattcccggaccccaacatggaagtacaagaacactgttatcccaaggagatatttccaaggggaaatggggagggacaaaaataaatattaggcatcaaattaaaat
